(19) United States
(12) Patent Application Publication
(10) Pub. No.: US 2022/0332844 A1
(43) Pub. Date: Oct. 20, 2022

(54) FIBROBLAST ACTIVATION PROTEIN BINDING AGENTS AND USE THEREOF

(71) Applicants: Orionis Biosciences, Inc., Waltham, MA (US); Orionis Biosciences BV, Zwijnaarde (BE)

(72) Inventors: Nikolai KLEY, Waltham, MA (US); Erik DEPLA, Zwijnaarde (BE); Lennart ZABEAU, Zwijnaarde (BE)

(21) Appl. No.: 17/442,771

(22) PCT Filed: Mar. 27, 2020
(86) PCT No.: PCT/US20/25427

§ 371 Date: Sep. 24, 2021

Related U.S. Application Data
(60) Provisional application No. 62/825,575, filed on Mar. 28, 2019.

(51) Int. Cl. C07K 16/40; C07K 14/56; C07K 14/565; C07K 14/525

(52) U.S. Cl. CPC C07K 16/40; C07K 14/56; C07K 14/565; C07K 14/525; C07K 2317/565; C07K 2319/02; A61K 38/00

(57) ABSTRACT

The present invention relates, in part, to agents, chimeric proteins and protein complexes that bind fibroblast activation protein (FAP) and their use as diagnostic and therapeutic agents. The present invention further relates to pharmaceutical compositions comprising the FAP binding agents, chimeric proteins and protein complexes and their use in the treatment of various diseases.

### CROSS-REFERENCE TO RELATED APPLICATIONS

[0001] This application is a National stage entry of International Application No. PCT/US20/25427, filed Mar. 27, 2020, which claims the benefit of and priority to U.S. Provisional Patent Application No. 62/825,575, filed Mar. 28, 2019, the contents of which are hereby incorporated by reference in their entirety.

### FIELD

[0002] The present technology relates, in part, to binding agents, chimeric proteins, and Fc-based chimeric protein complexes, which bind fibroblast activation protein (FAP) and their use as therapeutic and diagnostic agents.

### DESCRIPTION OF THE TEXT FILE SUBMITTED ELECTRONICALLY

[0003] The contents of the text file submitted electronically herewith are incorporated herein by reference in their entirety. A computer readable format copy of the Sequence Listing (Filename: ORN-059PC_ST25; Date created: Mar. 26, 2020; File size: 770,048 bytes).

### BACKGROUND

[0004] Fibroblasts regulate the structure and function of healthy tissues, participate transiently in tissue repair after acute inflammation, and assume an aberrant stimulatory role during chronic inflammatory states including cancer. Cancer-associated fibroblasts (CAFs) modulate the tumor microenvironment and influence the behavior of neoplastic cells in either a tumor-promoting or tumor-inhibiting manner. Understanding a tumor's microenvironment is important for the treatment of cancer. Fibroblasts express a diverse array of immumodulating factors such as cytokines, lipid mediators and growth factors. Moreover, fibroblasts display numerous surface and intracellular receptors and the requisite molecular machinery to respond to extrinsic signals. Fibroblasts can be considered extensions of the ‘professional’ immune system in view of the fact that fibroblasts can initiate inflammation. Fibroblasts participate in numerous normal and pathological processes. Illustrative diseases that aberrant fibroblasts are known to be associated with include cancer, cardiovascular disease, and autoimmune disease. CAFs are prominent stromal components and play important roles in modulating the tumor microenvironment and influencing the behavior of tumor cells primarily by releasing proteolytic enzymes, growth factors, and cytokines. Studies have shown that the cancer-promoting and therapy-resisting properties of the stroma can be attributed to the activity of fibroblasts.

[0005] Human Fibroblast Activation Protein (FAP; GenBank Accession Number AAC51668; NCBI Reference Sequence: NM 004460.3), also known as Seprase, is a 170 kDa integral membrane serine peptidase (EC 3.4.21.B28). FAP belongs to the dipeptidyl peptidase IV family and is a homodimer containing two N-glycosylated subunits with a large C-terminal extracellular domain, in which the enzyme's catalytic domain is located (Scanlan et al., Proc. Natl. Acad. Sci. USA 91 (1994), 5657-5661). FAP, in its glycosylated form, has both post-prolyl dipeptidyl peptidase and gelatinase activities (Sun et al., Protein Expr. Purif. 24 (2002), 274-281). Thus, FAP is a serine protease with both dipeptidyl peptidase, as well as endopeptidase activity cleaving gelatin and type I collagen.

[0006] FAP has a unique tissue distribution: its expression was found to be highly upregulated on reactive stromal fibroblasts of more than 90% of all primary and metastatic epithelial tumors, including lung, colorectal, bladder, ovarian and breast carcinomas, while it is generally absent from normal adult tissues (Rettig et al., Proc. Natl. Acad. Sci. USA 85 (1988), 3110-31 14; Garin-Chesa et al, Proc. Natl. Acad. Sci. USA 87 (1990), 7235-7239). Subsequent reports showed that FAP is not only expressed in stromal fibroblasts but also in some types of malignant cells of epithelial origin, and that FAP expression directly correlates with the malignant phenotype (Jin et al., Anticancer Res. 23 (2003), 3195-3198).

[0007] Due to its expression in many common cancers and its restricted expression in normal tissues, FAP is a promising antigenic target for imaging, diagnosis and therapy of a variety of carcinomas. There remains a need for improved therapies for treating diseases associated with aberrant fibroblasts, e.g., treating cancer by modifying CAF functions or fibrotic diseases.

### SUMMARY

[0008] In one aspect, the present technology relates to a fibroblast activation protein (FAP) binding agent that targets or binds to FAP. In some embodiments, the FAP binding agent comprises a FAP targeting moiety. The FAP binding agent or the FAP targeting moiety can be, e.g., a full-length antibody, a single-domain antibody, a recombinant heavy-chain-only antibody (VHH), a single-chain antibody (scFv), a shark heavy-chain-only antibody (VNAR), a microprotein, a darpin, an anticalin, an adnectin, an aptamer, a Fv, a Fab, a Fab′, a F(ab′)2, a peptide mimetic molecule, a natural ligand for a receptor, or a synthetic molecule. In some embodiments, the FAP targeting moiety is a single domain antibody (VHH). In some embodiments, the FAP binding agent directly or indirectly alters a disease microenvironment comprising the disease associated F2 fibroblasts (e.g. a tumor microenvironment comprising the disease associated F2 fibroblasts). In some embodiments, the FAP binding agent directly or indirectly polarizes the F2 fibroblast associated with a disease. In some embodiments, the FAP binding agent further comprises a signaling agent, e.g., without limitation, an interferon, an interleukin, and a tumor necrosis factor, that may be modified to attenuate their activity. In some embodiments, the FAP binding agent comprises additional targeting moieties that bind to other targets (e.g., antigens or receptors) of interest. In another embodiment, the other targets (e.g., antigens or receptors) of interest are present on fibroblast cells. In some embodiments, the other targets (e.g., antigens or receptors) of interest are present on fibroblast cells in cancer stroma. In some embodiments, the present fibroblast binding agent may directly or indirectly recruit an immune cell (e.g., a dendritic cell) to a site of action (such as, by way of non-limiting example, the tumor microenvironment). In some embodiments, the present FAP binding agent facilitates the presentation of antigens (e.g., antigens or receptors) by immune cells (e.g., dendritic cells, macrophages) in tumor stroma or directly by fibroblast cells.

[0009] In some embodiments, these FAP binding agents bind to, but do not functionally modulate (e.g., partially or fully neutralize) FAP. Therefore, in some embodiments, the present FAP binding agents have use in, for instance, directly or indirectly recruiting a FAP-expressing cell to a site of interest while still allowing the FAP-expressing cell to signal via FAP (i.e., the binding of the FAP binding agent does not reduce or eliminate FAP signaling at the site of interest). Conversely, in some embodiments, the present FAP binding agents have use in, for instance, directly or indirectly recruiting a FAP-expressing cell to a site of interest while not allowing the FAP-expressing cell to signal via FAP (i.e., the binding of the FAP binding agent reduces or eliminates FAP signaling at the site of interest). In some embodiments, the FAP targeting moiety is a single domain antibody (VHH).

[0010] In another aspect, the present technology relates to chimeric proteins or Fc-based chimeric protein complexes that have the FAP binding agents disclosed herein or have at least one targeting moiety that targets or binds to FAP. In another aspect, the FAP binding agents or the chimeric proteins or Fc-based chimeric protein complexes, disclosed herein, are useful in methods for the treatment of various diseases or disorders such as cancer, infections, inflammatory diseases or conditions, immune disorders, fibrotic diseases and other diseases and disorders.

[0011] In another aspect, one or more targeting moieties (i.e., FAP binding agents) and one or more signaling agents are conjugated to Fc domain(s) to form an Fc-based chimeric protein complex. In some embodiments, the one or more targeting moieties (i.e., FAP binding agents) and the one or more signaling agents are attached directly to the Fc domain(s) or attached via a linker. Such Fc-based chimeric protein complexes, surprisingly, have dramatically improved half-lives in vivo, as compared to chimeras lacking an Fc and, especially in the heterodimer configuration as described herein, are particularly amendable to production and purification.

[0012] Accordingly, the present Fc-based chimeric protein approach yields agents that are particularly suited for use as therapeutics.

[0013] In another aspect, the present technology relates to FAP binding agents, chimeric proteins, or Fc-based chimeric protein complexes that are cross-reactive across human, mouse and cynomolgus.

### BRIEF DESCRIPTION OF DRAWINGS

[0014] FIG. 1 shows Fluorescence-activated cell sorting (FACS) data for FAP VHH binding. FAP VHH periplasmic extracts were applied to HEK293T cells transiently transfected with human FAP, mouse FAP or an empty vector (MOCK). Binding was measured and plotted as the difference in mean fluorescent intensity (MFI) between FAP and MOCK transfected cells.

[0015] FIGS. 2A-H shows binding selection of VHHs to human, mouse, and cynomolgus monkey FAP in FACS. HEK293T cells transiently transfected with human FAP, mouse FAP or an empty vector (MOCK) were incubated with a serial dilution purified FAP VHH. Binding was measured and plotted as the difference in mean fluorescent intensity (MFI) between FAP and MOCK transfected cells.

[0016] FIG. 2A shows the data for 2PE14, FIG. 2B shows the data for 2PE17, FIG. 2C shows the data for 2PE36, FIG. 2D shows the data for 2PE40, FIG. 2E shows the data for 2PE42, FIG. 2F shows the data for 2PE44, FIG. 2G shows the data for 3PE12, FIG. 2H shows the data for 3PE42, FIG. 21 shows the data for 3PE57, FIG. 2J shows the data for 3PE93, and FIG. 2K shows the data for 3PE94.

[0017] FIGS. 3A-D show wild type IFNa2 and FAP VHH ActaFeron (AFN) signaling in HL116 and HL116-hFAP cells upon targeting. Parental HL116 or the derived HL116-hFAP cells were stimulated with wild type IFNa2 or FAP VHH AFN as indicated for 6 hours. Average luciferase values (±STDEV) of triplicate measurements are plotted. FIG. 3A shows the data for IFNa2, FIG. 3B shows the data for 2PE14-AFN, FIG. 3C shows the data for 3PE12-AFN, and FIG. 3D shows the data for 3PE42-AFN.

[0018] FIG. 4 shows protein sequence alignment for some embodiments of the human FAP binding VHHs. The boxes enclose CDR1, CDR2, CDR3 for these VHH sequences and show their alignment.

[0019] FIGS. 5A-F, 6A-H, 7A-H, 8A-D, 9A-F, 10A-J, 11A-D, 12A-F, 13A-J, 14A-F, 15A-L, 16A-L, 17A-F, 18A-L, 19A-L, 20A-J, 21A-J, 22A-F, and 23A-F show various non-limiting illustrative schematics of the Fc-based chimeric protein complexes of the present invention. In embodiments, each schematic is a composition of the present invention. Where applicable in the figures, “TM” refers to a “targeting moiety” as described herein. “SA” refers to a “signaling agent” as described herein. “ [symbol] ” is an optional “linker” as described herein. The two long parallel rectangles are human Fc domains, e.g. from IgG1, from IgG2, or from IgG4, as described herein and, optionally, with effector knock-out and/or stabilization mutations as also described herein. The two long parallel rectangles with one having a protrusion and the other having an indentation are human Fc domains, e.g. from IgG1, from IgG2, or from IgG4 as described herein with knob-in-hole and/or ionic pair (a/k/a charged pairs, ionic bond, or charged residue pair) mutations as described herein and, optionally, with effector knock-out and/or stabilization mutations as also described herein.

[0020] FIGS. 5A-F show illustrative homodimeric 2-chain complexes. These figures show illustrative configurations for the homodimeric 2-chain complexes.

[0021] FIGS. 6A-H show illustrative homodimeric 2-chain complexes with two targeting moieties (TM) (as described herein, more targeting moieties may be present in some embodiments). In embodiments, the position of TM1 and TM2 are interchangeable. In embodiments, the constructs shown in the box (i.e., FIGS. 6G and 6H) have signaling agent (SA) between TM1 and TM2 or between TM1 and Fc.

[0022] FIGS. 7A-H show illustrative homodimeric 2-chain complexes with two signaling agents (as described herein, more signaling agents may be present in some embodiments). In embodiments, the position of SA1 and SA2 are interchangeable. In embodiments, the constructs shown in the box (i.e., FIGS. 7G and 7H) have TM between SA1 and SA2 or TM at N- or C-terminus.

[0023] FIGS. 8A-D show illustrative heterodimeric 2-chain complexes with split TM and SA chains, namely the TM on the knob chain of the Fc and the SA on hole chain of the Fc.

[0024] FIGS. 9A-F show illustrative heterodimeric 2-chain complexes with split TM and SA chains, namely with both TMs on the knob chain of the Fc and with SA on hole chain of the Fc, with two targeting moieties (as described herein, more targeting moieties may be present in some embodiments). In embodiments, the position of TM1 and TM2 are interchangeable. In some embodiments, TM1 and TM2 can be identical.

[0025] FIGS. 10A-J show illustrative heterodimeric 2-chain complexes with split TM and SA chains, namely with TM on the knob chain of the Fc and with a SA on the hole chain of the Fc, with two signaling agents (as described herein, more signaling agents may be present in some embodiments). In these orientations/configurations, one SA is on the knob chain and one SA is on the hole chain. In embodiments, the position of SA1 and SA2 are interchangeable.

[0026] FIGS. 11A-D show illustrative heterodimeric 2-chain complexes with split TM and SA chains, namely the SA on the knob chain of the Fc and the TM on hole chain of the Fc.

[0027] FIGS. 12A-F show illustrative heterodimeric 2-chain complexes with split TM and SA chains, namely with SA on the knob chain of the Fc and both TMs on hole chain of the Fc, with two targeting moieties (as described herein, more targeting moieties may be present in some embodiments). In embodiments, the position of TM1 and TM2 are interchangeable. In some embodiments, TM1 and TM2 can be identical.

[0028] FIGS. 13A-J show illustrative heterodimeric 2-chain complexes with split TM and SA chains, namely with SA on the knob chain of the Fc and TM on hole chain of the Fc, with two signaling agents (as described herein, more signaling agents may be present in some embodiments). In these orientations/configurations, one SA is on the knob chain and one SA is on the hole chain. In embodiments, the position of SA1 and SA2 are interchangeable.

[0029] FIGS. 14A-F show illustrative heterodimeric 2-chain complexes with TM and SA on the same chain, namely the SA and TM both on the knob chain of the Fc.

[0030] FIGS. 15A-L show illustrative heterodimeric 2-chain complexes with a TM and a SA on the same chain, namely with SA and with TM both on the knob chain of the Fc, with two targeting moieties (as described herein, more targeting moieties may be present in some embodiments). In embodiments, the position of TM1 and TM2 are interchangeable. In some embodiments, TM1 and TM2 can be identical.

[0031] FIGS. 16A-L show illustrative heterodimeric 2-chain complexes with a TM and a SA on the same chain, namely with SA and with TM both on the knob chain of the Fc, with two signaling agents (as described herein, more signaling agents may be present in some embodiments). In embodiments, the position of SA1 and SA2 are interchangeable.

[0032] FIGS. 17A-F show illustrative heterodimeric 2-chain complexes with TM and SA on the same chain, namely the SA and TM both on the hole chain of the Fc.

[0033] FIGS. 18A-L show illustrative heterodimeric 2-chain complexes with a TM and a SA on the same chain, namely with SA and with TM both on the hole chain of the Fc, with two targeting moieties (as described herein, more targeting moieties are present in some embodiments). In embodiments, the position of TM1 and TM2 are interchangeable. In embodiments, TM1 and TM2 can be identical.

[0034] FIGS. 19A-L show illustrative heterodimeric 2-chain complexes with a TM and a SA on the same chain, namely with SA and with TM both on the hole chain of the Fc, with two signaling agents (as described herein, more signaling agents may be present in some embodiments). In embodiments, the position of SA1 and SA2 are interchangeable.

[0035] FIGS. 20A-J show illustrative heterodimeric 2-chain complexes with two targeting moieties (as described herein, more targeting moieties may be present in some embodiments) and with SA on knob Fc and TM on each chain. In embodiments, TM1 and TM2 can be identical.

[0036] FIGS. 21A-J show illustrative heterodimeric 2-chain complexes with two targeting moieties (as described herein, more targeting moieties may be present in some embodiments) and with SA on hole Fc and TM on each chain. In embodiments, TM1 and TM2 can be identical.

[0037] FIGS. 22A-F show illustrative heterodimeric 2-chain complexes with two signaling agents (as described herein, more signaling agents may be present in some embodiments) and with split SA and TM chains: SA on knob and TM on hole Fc.

[0038] FIGS. 23A-F show illustrative heterodimeric 2-chain complexes with two signaling agents (as described herein, more signaling agents may be present in some embodiments) and with split SA and TM chains: TM on knob and SA on hole Fc.

[0039] FIGS. 24A-H show sensorgrams of FAP VHH variants binding to biotinylated FAP in bio-layer interferometry (BLI).

### DETAILED DESCRIPTION

[0040] The present technology is based, in part, on the discovery of fibroblast binding agents or fibroblast activation protein binding agents (e.g., antibodies, such as, by way of non-limiting example, VHHs) that recognize, target, or bind to fibroblasts or to fibroblast activation protein. In some embodiments, the present fibroblast binding agents are part of a chimeric or fusion protein or a Fc-based chimeric protein complex with one or more targeting moieties and/or one or more signaling agents.

[0041] In some embodiments, the fibroblast binding agent or fibroblast activation protein binding agents target F2 fibroblasts. In some embodiments, the fibroblast binding agent or FAP binding agent directly or indirectly alters a disease microenvironment comprising the disease associated F2 fibroblasts (e.g. a tumor microenvironment comprising the F2 fibroblasts). In some embodiments, the fibroblast binding agent or FAP binding agent directly or indirectly polarizes the F2 fibroblast into Fl fibroblast, where in some instances, the fibroblast is associated with a disease.

[0042] F2 fibroblast(s) refers to pro-tumorigenic (or tumor promoting) cancer-associated fibroblasts (CAFs) (a/k/a Type II-CAF). Fl fibroblast(s) refers to tumor suppressive CAFs (a/k/a Type I-CAF). Polarization refers to changing the phenotype of cell, e.g. changing a tumorigenic F2 fibroblast to a tumor suppressive Fl fibroblast.

[0043] In some embodiments, the fibroblast binding agent or FAP binding agent targets a FAP marker. In some embodiments, the fibroblast binding agent or FAP binding agent comprises a FAP targeting moiety. In some embodiments, the fibroblast binding agent's or FAP binding agent's FAP targeting moiety is any FAP targeting moiety disclosed herein

[0044] In some embodiments, fibroblast binding agent or FAP binding agent comprises an amino acid sequence having at least 90% sequence similarity with any one of SEQ ID NO: 2-42 or 46-86.

[0045] In some embodiments, fibroblast binding agent or FAP binding agent further comprises one or more signaling agents. In some embodiments, the signaling agent is selected from one or more of an interferon, an interleukin, and a tumor necrosis factor, any of which are optionally modified.

[0046] In some embodiments, a fibroblast binding agent or FAP binding agent further comprising one or more signaling agents directly or indirectly alters a disease microenvironment comprising the disease associated F2 fibroblasts (e.g. a tumor microenvironment comprising the F2 fibroblasts). In some embodiments, the fibroblast binding agent or FAP binding agent further comprising one or more signaling agents directly or indirectly polarizes the F2 fibroblast into Fl fibroblast.

[0047] In some embodiments, fibroblast binding agent or FAP binding agent further comprises one or more additional targeting moieties. In some embodiments, the one or more additional targeting moieties recognize and optionally functionally modulate a tumor antigen. In some embodiments, the one or more additional targeting moieties recognize and optionally functionally modulate an antigen on an immune cell.

[0048] In some embodiments, the immune cell is selected from a T cell, a B cell, a dendritic cell, a macrophage, neutrophil, and a NK cell.

[0049] In some embodiments, the fibroblast binding agent or FAP binding agent recruits cytotoxic T cells to tumor cells or to the tumor environment.

[0050] In some embodiments, the fibroblast binding agent or FAP binding agent recognizes and binds FAP without substantially functionally modulating its activity.

[0051] In another aspect, the present technology is based, in part, on the discovery of agents (e.g., antibodies, such as, by way of non-limiting example, VHHs) that recognize and bind to fibroblast activation protein (FAP). In some embodiments, the present FAP binding agents are part of a chimeric or fusion protein or Fc-based chimeric protein complex with one or more targeting moieties and/or one or more signaling agents. In some embodiments, these FAP binding agents bind to, but do not functionally modulate FAP. In some embodiments, the FAP binding agents may bind and directly or indirectly recruit immune cells to sites in need of therapeutic action (e.g., a tumor or tumor microenvironment). In some embodiments, the FAP binding agents enhance tumor antigen presentation for elicitation of effective antitumor immune response.

[0052] In some embodiments, the FAP binding agents modulate antigen presentation. In some embodiments, the FAP binding agents temper the immune response to avoid or reduce autoimmunity. In some embodiments, the FAP binding agents provide immunosuppression. In some embodiments, the FAP binding agents cause an increase a ratio of Tregs to CD8+ T cells and/or CD4+ T cells in a patient. In some embodiments, the present methods relate to reduction of auto-reactive T cells in a patient.

[0053] In some embodiments, the present technology provides pharmaceutical compositions comprising the FAP binding agents and their use in the treatment of various diseases, including fibrotic diseases. In some embodiments, the present technology provides pharmaceutical compositions comprising the FAP binding agents and their use in the treatment of various diseases, including cancer, autoimmune, and/or neurodegenerative diseases.

[0054] In some embodiments, the present FAP binding agents are used to target to cancer-associated fibroblasts (CAFs). For instance, in various embodiments, the present FAP binding agents target fibroblasts within a tumor stroma, e.g. in the treatment of a cancer, e.g. an epithelial-derived cancer such as a carcinoma. As CAFs are central to regulating the dynamic and reciprocal interactions that occur among the malignant epithelial cells, the extracellular matrix (ECM), and the numerous noncancerous cells that are frequently found within the tumor milieu, including endothelial, adipose, inflammatory, and immune cells, the present FAP binding agents provide a way to deliver crucial anti-tumor therapies (e.g. a modified cytokine and/or additional targeting moieties as described elsewhere herein) to a site of interest. In various embodiments, the present FAP binding agents target to a stromal microenvironment composed of activated fibroblasts, endothelial cells (ECs) involved in tubulogenesis, and extracellular matrix (ECM) that is constantly remodeled to accommodate growth of a tumor. Accordingly, e.g. in the context of a chimera (or chimera complex) with a cytokine, optionally with additional targeting moieties, the present FAP binding agents can deliver an anti-tumor signal to the stromal microenvironment which is crucial for tumor development. In various embodiments, the FAP- binding agents are used to target to the membranes of cells critical to tumor niche formation in primary tumors or metastases, such as, cancer-associated fibroblasts, MSCs, selected cancer cells, and endothelial cells.

[0055] FAP Binding Agents

[0056] Fibroblast activation protein (FAP) is a 170 kDa melanoma membrane-bound gelatinase that belongs to the serine protease family. FAP is selectively expressed in reactive stromal fibroblasts of epithelial cancers, granulation tissue of healing wounds, and malignant cells of bone and soft tissue sarcomas. FAP is believed to be involved in the control of fibroblast growth or epithelial-mesenchymal interactions during development, tissue repair, and epithelial carcinogenesis

[0057] In some embodiments, the present FAP binding agent is a protein-based agent capable of specific binding to FAP. In some embodiments, the present FAP binding agent is a protein-based agent capable of specific binding to FAP without functional modulation (e.g., partial or full neutralization) of FAP.

[0058] In some embodiments, the FAP binding agent of the present technology comprises a targeting moiety having an antigen recognition domain that recognizes an epitope present on FAP. In some embodiments, the antigen-recognition domain recognizes one or more linear epitopes present on FAP. As used herein, a linear epitope refers to any continuous sequence of amino acids present on FAP. In another embodiment, the antigen-recognition domain recognizes one or more conformational epitopes present on FAP. As used herein, a conformation epitope refers to one or more sections of amino acids (which may be discontinuous), which form a three-dimensional surface with features and/or shapes and/or tertiary structures capable of being recognized by an antigen recognition domain.

[0059] In some embodiments, the FAP binding agent of the present technology may bind to the full-length and/or mature forms and/or isoforms and/or splice variants and/or fragments and/or any other naturally occurring or synthetic analogs, variants, or mutants of human FAP. In some embodiments, the FAP binding agent of the present technology may bind to any forms of the human FAP, including monomeric, dimeric, heterodimeric, multimeric and associated forms. In an embodiment, the FAP binding agent binds to the monomeric form of FAP. In another embodiment, the FAP binding agent binds to a dimeric form of FAP. In a further embodiment, the FAP binding agent binds to glycosylated form of FAP, which may be either monomeric or dimeric.

[0060] In an embodiment, the present FAP binding agent comprises a targeting moiety with an antigen recognition domain that recognizes one or more epitopes present on human FAP. In some embodiments, the human FAP comprises the amino acid sequence of:

(SEQ ID NO: 1)
MKTWKIVFGVATSAVLALLVMCIVLRPSRVHNSEENTMRALTLKDILNG
TFSYKTFFPNWISGQEYLHQSADNNIVLYNIETGQSYTILSNRTMKSVN
ASNYGLSPDRQFVYLESDYSKLWRYSYTATYYIYDLSNGEFVRGNELPR
PIQYLCWSPVGSKLAYVYQNNIYLKQRPGDPPFQITFNGRENKIFNGIP
DWVYEEEMLPTKYALWWSPNGKFLAYAEFNDKDIPVIAYSYYGDEQYPR
TINIPYPKAGAKNPWVRIFIIDTTYPAYVGPQEVPVPAMIASSDYYFSW
LTWTDERVCLQWLKRVQNVSVLSICDFREDWQTWDCPKTQEHIEESRTG
WAGGFFVSRPVFSYDAISYYKIFSDKDGYKHIHYIKDTVENAIQITSGK
WEAINIFRVTQDSLFYSSNEFEEYPGRRNIYRISIGSYPPSKKCVTCHL
RKERCQYYTASFSDYAKYYALVCYGPGIPISTLHDGRTDQEIKILEENK
ELENALKNIQLPKEEIKKLEVDEITLWYKMILPPQFDRSKKYPLLIQVY
GGPCSQSVRSVFAVNWISYLASKEGMVIALVDGRGTAFQGDKLLYAVYR
KLGVYEVEDQITAVRKFIEMGFIDEKRIAIWGWSYGGYVSSLALASGTG
LFKCGIAVAPVSSWEYYASVYTERFMGLPTKDDNLEHYKNSTVMARAEY
FRNVDYLLIHGTADDNVHFQNSAQIAKALVNAQVDFQAMWYSDQNHGLS
GLSTNHLYTHMTHFLKQCFSLSD.

[0061] In some embodiments, the present FAP binding agent comprises a targeting moiety capable of specific binding. In some embodiments, the FAP binding agent comprises a targeting moiety having an antigen recognition domain such as an antibody or derivatives thereof. In an embodiment, the FAP binding agent comprises a targeting moiety that is an antibody. In some embodiments, the antibody is a full-length multimeric protein that includes two heavy chains and two light chains. Each heavy chain includes one variable region (e.g., V_{H}) and at least three constant regions (e.g., CH₁, CH₂ and CH₃), and each light chain includes one variable region (V_{L}) and one constant region (C_{L}). The variable regions determine the specificity of the antibody. Each variable region comprises three hypervariable regions also known as complementarity-determining regions (CDRs) flanked by four relatively conserved framework regions (FRs). The three CDRs, referred to as CDR1, CDR2, and CDR3, contribute to the antibody binding specificity. In some embodiments, the antibody is a chimeric antibody. In some embodiments, the antibody is a humanized antibody.

[0062] In some embodiments, the FAP binding agent comprises a targeting moiety that is an antibody derivative or format. In some embodiments, the present FAP binding agent comprises a targeting moiety which is a single-domain antibody, a recombinant heavy-chain-only antibody (VHH), a single-chain antibody (scFv), a shark heavy-chain-only antibody (VNAR), a microprotein (cysteine knot protein, knottin), a DARPin; a Tetranectin; an Affibody; a Transbody; an Anticalin; an AdNectin; an Affilin; an Affimer, a Microbody; an aptamer; an alterase; a plastic antibody; a phylomer; a stradobody; a maxibody; an evibody; a fynomer, an armadillo repeat protein, a Kunitz domain, an avimer, an atrimer, a probody, an immunobody, a triomab, a troybody; a pepbody; a vaccibody, a UniBody; a DuoBody, a Fv, a Fab, a Fab′, a F(ab′)2, a peptide mimetic molecule, or a synthetic molecule, as described in US Patent Nos. or Patent Publication Nos. U.S. Pat. No. 7,417,130, US 2004/132094, U.S. Pat. No. 5,831,012, US 2004/023334, U.S. Pat. Nos. 7,250,297, 6,818,418, US 2004/209243, U.S. Pat. Nos. 7,838,629, 7,186,524, 6,004,746, 5,475,096, US 2004/146938, US 2004/157209, U.S. Pat. Nos. 6,994,982, 6,794,144, US 2010/239633, U.S. Pat. No. 7,803,907, US 2010/119446, and/or U.S. Pat. No. 7,166,697, the contents of which are hereby incorporated by reference in their entireties. See also, Storz MAbs. 2011 May-June; 3(3): 310-317.

[0063] In some embodiments, the FAP binding agent comprises a targeting moiety that is a single-domain antibody, such as a VHH. The VHH may be derived from, for example, an organism that produces VHH antibody such as a camelid, a shark, or the VHH may be a designed VHH. VHHs are antibody-derived therapeutic proteins that contain the unique structural and functional properties of naturally-occurring heavy-chain antibodies. VHH technology is based on fully functional antibodies from camelids that lack light chains. These heavy-chain antibodies contain a single variable domain (VHH) and two constant domains (CH2 and CH3). VHHs are commercially available under the trademark of NANOBODY or NANOBODIES.

[0064] In an embodiment, the FAP binding agent comprises a VHH. In some embodiments, the VHH is a humanized VHH or camelized VHH.

[0065] In some embodiments, the VHH comprises a fully human VH domain, e.g. a HUMABODY (Crescendo Biologics, Cambridge, UK). In some embodiments, fully human VH domain, e.g. a HUMABODY is monovalent, bivalent, or trivalent. In some embodiments, the fully human VH domain, e.g. a HUMABODY is mono- or multi-specific such as monospecific, bispecific, or trispecific. Illustrative fully human VH domains, e.g. a HUMABODIES are described in, for example, WO 2016/113555 and WO 2016/113557, the entire disclosures of which are incorporated by reference.

[0066] By way of example, but not by way of limitation, in some embodiments, a human VHH FAP binding agent comprises an amino acid sequence selected from the following sequences:

2PE2:
(SEQ ID NO: 2)
QVQLQESGGGSVQVGGSLRLSCADSGSTFTINAMGWYRQAPGKRRDWAGITSSGVTQYPDSVKGRFTISRDNAKN
TVYLQMNSLKPEDTAVYYCNLWPPRASPSGRIYWGQGTQVTVSS
2PE5:
(SEQ ID NO: 3)
QVQLQESGGGLVQPGGSLRLSCAASESTFSINAVAWYRQAPGKRRELVAGISGGGVTSYPDSVKGRFTISRDNAKNIV
YLQMSSLKPEDTAVYYCNLWPPRASPGGRVYWGQGTQVTVSS
2PE7:
(SEQ ID NO: 4)
QVQLQESGGGLVHAGGSLRLSCADSGSTFSVNAVGWYRQAPGKRRDVWAGITSDGVTNYPDSVKGRFTISRDNAKN
TVYLQMNSLKPEDTAVYYCNLWPPRASPSGRIYWGQGTQVTVSS
2PE13:
(SEQ ID NO: 5)
QVQLQESGGGLVQVGGSLRLSCAASGSTFILNAMAWYRQAPGNRRELVAGISSGGDTNYPDSVKGRFTISRDNANNIV
YLQMNSLKLEDTAVYYCNLWPPRASPSGRVYWGQGTQVTVSS
2PE14:
(SEQ ID NO: 6)
QVQLQESGGGLVQPGGSLRLSCAASGSTFSINAVAWYRQAPGKRRELVAGISGGGVTNYPDSVKGRFTISRDNAKNT
VYLQMSSLKPEDTAVYYCNLWPPRASPGGRVYWGQGTQVTVSS
2PE17:
(SEQ ID NO: 7)
QVQLQESGGGLVQSGGSLRLSCAASGSTFSINAVAWYRQAPGKRRELVAGISGGGVTNYPDSVKGRFTISRDNAKNT
VYLQMSSLKPEDTAVYYCNLWPPRASPGGRVYWGQGTQVTVSS
2PE19:
(SEQ ID NO: 8)
QVQLQESGGGLVQPGGSLRLSCADSGSTFTINAMAWYRQAPGKRRELVAGISGGVTNYPDSVKGRFTISRDNAKNTV
YLQMSSLKPEDTAVYYCNLWPPRASPDGRVYWGQGTQVTVSS
2PE20:
(SEQ ID NO: 9)
QVQLQESGGGLVQPGGSLRLSCAASESTFSINAVAWYRQAPGKRRELVAGISGGGVTNYPDSVKGRFTVSRDNAKNI
VYLQMSSLKPEDTAVYYCNLWPPRASPGGRVYWGQGTQVTVSS
2PE23:
(SEQ ID NO: 10)
QVQLQESGGGLVQPGGSLRLSCADSGSTFSINNAMGWYRQAPGKRRDWVAGITSSGVTNYPDSVKGRFTISRDNAK
NTVYLQMNSLKPEDTAVYYCNLWPPRASPSGTIYWGQGTQVTVSS
2PE25:
(SEQ ID NO: 11)
QVQLQESGGGLVQVGGSLRLSCAASGSSFIINAMGWYRQAPGKRRELVAGISSDGATHYPDSVKGRFTISRDNAKNIV
YLQMNSLKPEDTAVYYCNLWPPRASPSGRVYWGQGTQVTVSS
2PE27:
(SEQ ID NO: 12)
QVQLQESGGGLVQPGGSLRLSCAASGSISSINAMAWYRQAPGKRRELVAGIDGGGVTNYPDSVKGRFTISRDNAKNT
VYLQMSSLKPEDTAVYYCNLWPPRASPGGRVYWGQGTQVTVSS
2PE28:
(SEQ ID NO: 13)
QVQLQESGGGLVQIGGSLRLSCADSGSTFSINNAMGWYRQAPGKRRDWVAGITSSGVTNYPDSVKGRFTISRDNAKN
TVYLQMNSLKPEDTAVYYCNLWPPRASPSGTIYWGQGTQVTVSS
2PE29:
(SEQ ID NO: 14)
QVQLQESGGGLVQPGGSLRLSCAASGSTSSINAMAWYRQAPGKRRELVAGIDGGGVTNYPDSVKGRFTISRDNAKNT
VYLQMSSLKPEDTAVYYCNLWPPRASPGGRVYWGQGTQVTVSS
2PE30:
(SEQ ID NO: 15)
QVQLQESGGGLVQVGGSLRLSCADSGSTFSINNAMGWYRQAPGKRRDWVAGITSSGVTNYPDSVKGRFTISRDNAK
NTVYLQMNSLKPEDTAVYYCNLWPPRASPSGRIYWGQGTQVTVSS
2PE32:
(SEQ ID NO: 16)
QVQLQESGGGLVQVGGSLRLSCAASGSTFSINAMGWYRQAPGKRRELVAGISSDDITYYPDSVKGRFTISRDNAKNTV
YLQMNSLKPEDTAVYYCNLWPPRASPSGRGYWGQGTQVTVSS
2PE33:
(SEQ ID NO: 17)
QVQLQESGGGLVQPGGSLRLSCADSGSTFSINSMGWYRQAPGKRRDWVAGITTDGITKYPDSLKGRFTISRDNAKNT
VYLQMNSLKPEDTAVYYCNLWPPRASPSGRLYWGQGTQVTVSS
2PE36:
(SEQ ID NO: 18)
QVQLQESGGGLVQPGGSLRLSCAASGSTFSINAVAWYRQAPGKRRELVAGISGGGVTNYPDSVKGRFTISRDNAKNT
VYLQMSSLKPEDTAVYYCNLWPPRASPDGRVYWGQGTQVTVSS
2PE38:
(SEQ ID NO: 19)
QVQLQESGGGLVQAGESLRLSCAASGSTFTINAMGWYRXAPGKRRDWVAGITSSGVTQYPDSVKGRFTISRDNAKNT
VYLQMNSLKPEDTAVYYCNLWPPRASPSGRIYWGQGTQVTVSS
2PE39:
(SEQ ID NO: 20)
QVQLQESGGGLVQVGGSLRLSCADSGSTFSVNAVGWYRQAPGKRRDVWAGITSDGVTNYPDSVKGRFTISRDNAKN
TVYLQMNSLKPEDTAVYYCNLWPPRASPSGRIYWGQGTQVTVSS
2PE40:
(SEQ ID NO: 21)
QVQLQESGGGLVQPGGSLRLSCAASESTFSINAVAWYRQAPGKRRELVAGISGGGVTNYPDSVKGRFTISRDNAKNIV
YLQMSSLKPEDTAVYYCNLWPPRASPGGRVYWGQGTQVTVSS
2PE41:
(SEQ ID NO: 22)
QVQLQESGGGLVQVGGSLRLSCADSGSTFSINSMGWYRQAPGKHRDWAGITTDGITKYPDSLKGRFTISRDNAKNT
VYLQMNSLKPEDTAVYYCNLWPPRASPSGRLYWGQGTQVTVSS
2PE42:
(SEQ ID NO: 23)
QVQLQESGGGLVQAGGSLRLSCAASGSTFSINAVAWYRQAPGKRRELVAGISGGGVTNYPDSVRGRFTISRDNAKNT
VYLQMSSLKPEDTAVYYCNLWPPRASPDGRVYWGQGTQVTVSS
2PE43:
(SEQ ID NO: 24)
QVQLQESGGGLVQPGGSLTLACKGSGVELSRSAMAWYQQAPGKRRDWVAGITSSGVTQYPDSVKGRFTISRDNAKN
TVYLQMNSLKPEDAAVYYCNLWPPRASPSGRIYWGQGTQVTVSS
2PE44:
(SEQ ID NO: 25)
QVQLQESGGGLVQPGGSLRLSCAASGSTFSVNAVAWYRQAPGKRRELVAGISGGGVTNYPDSVKGRFTISRDNAKNT
VYLQMSSLIPEDTAVYYCNLWPPRASPGGRVYWGQGTQVTVSS
2PE47:
(SEQ ID NO: 26)
QVQLQESGGGLVQVGGSLRLSCAASGSTFSINNAMGWYRQAPGKRREVWAGISSGGVTHYPDSVKGRFTISRDNAK
NIVYLQMDSLKPEDTAVYYCNLWPPRASPSGSIYWGQGTQVTVSS
2PE49:
(SEQ ID NO: 27)
QVQLQESGGGLVQAGGSLRLSCTASGSISSINAMAWYRQAPGKRRELVAGIDGGGVTNYPDSVKGRFTISRDNAKNT
VYLQMSSLKPEDTAVYYCNLWPPRASPGGRVYWGQGTQVTVSS
2PE55:
(SEQ ID NO: 28)
QVQLQESGGGLVQPGGSLRLSCAASESTFSINAVAWYRQAPGKRRELVAGISGGGVTNHPDSVKGRFTISRDNAKNIV
YLQMSSLKPEDTAVYYCNLWPPRASPGGRVYWGQGTQVTVSS
2PE56:
(SEQ ID NO: 29)
QVQLQESGGGLVQPGGSLRLSCADSGSTFTINAMGWYRQAPGKRRDVWAGITSSGVTQYPDSVKGRFTISRDNAKNT
VYLQMNSLKPEDTAVYYCNLWPPRASPSGRIYWGQGTQVTVSS
2PE58:
(SEQ ID NO: 30)
QVQLQESGGGLVQVGGSLRLSCAASGSTFSINAMGWYRQAPGKRREWVAGISSSGPPHYPDSVKGRFTISRDNAKNT
VYLQMNSLKPEDTAVYYCNLWPPMASPSGAIYWGQGTQVTVSS
2PE59:
(SEQ ID NO: 31)
QVQLQESGGGLVQPGGSLRLSCAVSGSIFSLNAMAWYRQAPGKRRELVAGISGGSVTNYPDSVKGRFTISRDSTKNT
VYLQMSSLKPEDTAVYYCNLWPPRASPGGRVYWGQGTQVTVSS
2PE60:
(SEQ ID NO: 32)
QVQLQESGGGLVQPGGSLRLSCAASGSTFSINAMAWYRQAPGKRRELVAGISGGGVTNYPDSVKGRFTISRDNAKNT
VYLQMSSLKPEDTAVYYCNLWPPRASPGGRVYWGQGTQVTVSS
2PE61:
(SEQ ID NO: 33)
QVQLQESGGGLVQPGGSLRLICAASGSTFSGNAMAWYRXAPGKRRELVAGISGGITTYPDSVKGRFTISRDNAKNTVY
LQMSSLKPEDTAVYYCNLWPPRASPGGLVYWGQGTQVTVSS
2PE62:
(SEQ ID NO: 34)
QVQLQESGGGLVQAGGSLRLSCADSSGSTFSINAMAWYRQAPGKRRDVWAGITSDSVTKYPDSVKGRFTISRDNAKN
TVYLQMNSLKPEDTAVYYCNLWPPRASPSGRIDWGQGTQVTVSS
2PE63:
(SEQ ID NO: 35)
QVQLQESGGGLVQVGGSLRLSCAASGSTFSINNAMGWYRQAPGKRREVWAGISSGGVTHYPDSVKGRFTISRDNAK
NIVYLQMNSLKPEDTAVYYCNLWPPRASPSGSIYWGQGTQVTVSS
2PE67:
(SEQ ID NO: 36)
QVQLQESGGGLVQVGGSLRLSCAASGSTFILNAMGWYRQAPGNRRELVAGISSGGDTNYPDSVKGRFTISRDNANNI
VYLQMNSLKLEDTAVYYCNLWPPRASPSGRPYWGQGTQVTVSS
2PE68:
(SEQ ID NO: 37)
QVQLQESGGGLVQPGGSLRLSCAASGSIFSTNAMAWYRQAPGKRRELVAGISGGGVTNYPDSVKGRFTISRDNAKNT
VYLQMSSLKPEDTAVYYCNLWPPRAPPDGRVYWGQGTQVTVSS
2PE71:
(SEQ ID NO: 38)
QVQLQESGGGMVQSGRSLRLSCLASVNIVNLNSVGWYRQAPGQQRELVASITSAGSTNYAESVKGRFTISRDNSKNT
VYLQMNSLKPSDTAVYYCNLWPPRVSPSGRGYWGQGTQVTVSS
2PE72:
(SEQ ID NO: 39)
QVQLQESGGGLVQPGGSLRLSCAASGSISSINAMAWYRQAPGRRRELVAGIDGGGVTNYPDSVKGRFTISRDHAKNT
VYLQMSSLKPEDTAVYYCNLWPPRASPGGRVYWGQGTQVTVSS
2PE76:
(SEQ ID NO: 40)
QVQLQESGGGLVQVGGSLRLSCAASGSTFSINNAMGWYRQAPGKRREVWAGISSGGVTHYPDSVKGRFAISRDNAK
NIVYLQMDSLKPEDTAVYYCNLWPPRASPSGSIYWGQGTQVTVSS
2PE83:
(SEQ ID NO: 41)
QVQLQESGGGLVQVGGSLRLSCADSGSTFSINSMGWYRQAPGKRRDWVAGITTDGITKYPDSLKGRFTISRDNAKNT
VYLQMNSLKPEDTAVYYCNLWPPRASPSGRLYWGQGTQVTVSS
2PE84:
(SEQ ID NO: 42)
QVQLQESGGGLVQAGGSLRLSCAASGSISSLNAMGWYRQAPGKQREWVAGITSGGSTNYADSVKGRFTILRDNAKNT
VYLQMSSLKFEDTAVYYCNLWPPRASPSGAVYWGQGTQVTVSS.

[0067] In various illustrative embodiments, the FAP binding agent comprises an amino acid sequence selected from any one of the sequences provided above with or without a terminal histidine tag sequence (i.e., HHHHHH; SEQ ID NO: 43).

[0068] In various illustrative embodiments, the FAP binding agent comprises an amino acid sequence selected from any one of the sequences provided above with or without a HA tag (i.e., YPYDVPDYGS; SEQ ID NO: 44).

[0069] In various illustrative embodiments, the FAP binding agent comprises an amino acid sequence selected from any one of the sequences provided above with or without an AM linker (i.e., AAA).

[0070] In various illustrative embodiments, the FAP binding agent comprises an amino acid sequence selected from any one of the sequences provided above with or without an AAA linker, HA tag, and terminal histidine tag sequence (i.e., AAAYPYDVPDYGSHHHHHH; SEQ ID NO: 45).

[0071] By way of example, but not by way of limitation, in some embodiments, a human VHH FAP binding agent comprises an amino acid sequence selected from the following sequences:

2PE86:
(SEQ ID NO: 46)
QVQLQESGGGLVQVGGSLRLSCADSGSTFSINAMGWYRQAPGKRRDWAGITSDGVTKYPDSVKGRFTISRDNAKNT
VYLQMNSLKPEDTAVYYCNLWPPRVSPSGRIYWGQGTQVTVSS
2PE87:
(SEQ ID NO: 47)
QVQLQESGGGLVQVGGSLRLSCAASGSTFSINNAMGWYRQAPGKRREVWAGISSGGVTHYPDSVKGRFTISRDNAK
NIVYLQMDSLKPEDTAAYYCNLWPPRASPSGSIYWGQGTQVTVSS
2PE88:
(SEQ ID NO: 48)
QVQLQESGGGLVQPGGSLRLSCAASESTFSINAVAWYRQAPGKRRELVAGISGGGVTNYPDSVKGRFTISRDNAKNIV
YLQMSSLKPEDTAVYYCNLWPPRAPPGGRVYWGQGTQVTVSS
2PE95:
(SEQ ID NO: 49)
QVQLQESGGGLVQVGGSLRLSCADSGSTFSINAMGWYRQAPGKRRDWAGITSSGVTKYPDSVKGRFTISRDNAKNT
VYLQMNSLKPEDTAVYYCNLWPPRASPSGRIYWGQGTQVTVSS
3PE1:
(SEQ ID NO: 50)
QVQLQESGGGLVQAGGSLKLSCAGSGSTFSINAMAWYRQAPGERRELVAGISGDNITNYPDSVKGRFTISRDNAKNTV
YLQMSSLKPEDTAVYYCNLWPPRASPGGRVYWGQGTQVTVSS
3PE5:
(SEQ ID NO: 51)
QVQLQESGGGLVQPGGSLRLSCAASGSTFSINAMAWYRQAPGQRRELVAGISGGGVTNYPDSVKGRFTISRDNAKNT
VYLQMSSLKPEDTAVYYCNLWPPRASPGGRVYWGQGTQVTVSS
3PE12:
(SEQ ID NO: 52)
QVQLQESGGGLVQPGGSLRLSCAASGSTFSGNAMAWYRQAPGKRRELVAGISGGGVTNYPDSVKGRFTISRDNAKN
TVYLQMSSLKPEDTAVYYCNLWPPRVSPGGGVYWGQGTQVTVSS
3PE21:
(SEQ ID NO: 53)
QVQLQESGGGLVQAGESLRLSCAASGRDFRDNSMGWYRQAPGKRREWVAGISSGGVTHYPDSVKGRFTISRDNAKN
IVYLQMDSLKPEDTAVYYCNLWPPRASPSGSIYWGQGTQVTVSS
3PE28:
(SEQ ID NO: 54)
QVQLQESGGGLVQPEGSLRLSCAASGSISSINAMAWYRQAPGKRRELVAGIDGGGVTNYPDSVKGRFTISRDNAKNTV
YLQMSSLKPEDTAVYYCNLWPPRASPGGRVYWGQGTQVTVSS
3PE42:
(SEQ ID NO: 55)
QVQLQESGGGLVQPGESLRLSCAVSGSTSSMNAMAWYRQAPGKRRELVAGISGGGATNYPDSVKGRFTISRDNAKN
TVYLQMSSLKPEDTAVYYCNLWPPRASPGGGVYWGQGTQVTVSS
3PE43:
(SEQ ID NO: 56)
QVQLQESGGGLVQAGGSLRLSCAASGSTFSVNAVAWYRQAPGKRRELVAGISGGGVTNYPDSVKGRFTISRDNAKNT
VYLQMSSLKPEDTAVYYCNLWPPRASPDGRVYWGQGTQVTVSS
3PE44:
(SEQ ID NO: 57)
QVQLQESGGGLVQPGGSLRLSCAASGSTFSINAMAWYRQAPGKRRELVAGISGGDVTHYPDSVKGRFTISRDNAKNT
VYLQMSSLKPEDTAVYYCNLWPPRASPGGRVYWGQGTQVTVSS
3PE47:
(SEQ ID NO: 58)
QVQLQESGGGLVQPGGSLRLSCAASGSTFSINAVAWYRQAPGKRRELVAGISGGGVTNYPDSVKGRFTISRDNAKNT
VYLQMSSLIPEDTAVYYCNLWPPRASPGGRVYWGQGTQVTVSS
3PE49:
(SEQ ID NO: 59)
QVQLQESGGGLVQPGGSLRLSCAGSGSTFSINAMAWYRQAPGERRELVAGISGDNITNYPNSVKGRFTISRDNAKNTV
YLQMSSLKPEDTAVYYCNLWPPRASPGGRVYWGQGTQVTVSS
3PE57:
(SEQ ID NO: 60)
QVQLQESGGGLVQPGGSLRLSCAASGSTFSVNAVAWYRQAPGKRRELVAGISGGGVTNYPDSVKGRFTISRDNAKNT
VYLQMSSLKPEDTAVYYCNLWPPRASPDGRVYWGQGTQVTVSS
3PE62:
(SEQ ID NO: 61)
QVQLQESGGGLVQPGGSLRLSCAASGSTFSSNAMAWYRQAPGKRRELVAGISGGGVTNYPDSVKGRFTISRDNAKN
TVYLQMSSLKPEDTAVYYCNLWPPRASPDGGVYWGQGTQVTVSS
3PE69:
(SEQ ID NO: 62)
QVQLQESGGGLVQPGGSLTLSCTTSEFTLAYFGVGWFRQAPGKRRDWVAGITTDGITKYPDSLKGRFTISRDNAKNTV
YLQMNSLKPEDTAVYYCNLWPPRASPSGRLYWGQGTQVTVSS
3PE72:
(SEQ ID NO: 63)
QVQLQESGGGLVQAGGSLRLSCAASGSTFSGNAMAWYRRAPGKRRELVAGISGGGVTNYPDSVKGRFTISRDNAKN
TVYLQMSSLKPEDTAVYYCNLWPPRVSPGGRVYWGQGTQVTVSS
3PE77:
(SEQ ID NO: 64)
QVQLQESGGGLVQPGGSLRLSCADSGSTFTINAMAWYRQAPGKRRELVAGISGGVTNYPDSVKGRFTISRDNAKNTV
YLQMSSLKPEDTAVYYCNLWPPRASPDGRVYWSQGTQVTVSS
3PE82:
(SEQ ID NO: 65)
QVQLQESGGGLVQPEGSLRLSCAASGSISSINAMAWYRQAPGKRRELVAGIDGGGVTNYPDSVKGRFTISRDNAKNTV
YLQMSSLKPEDTAVYYCNLWPPRASPGGRVYWGKGTQVTVSS
3PE90:
(SEQ ID NO: 66)
QVQLQESGGGLVQVGGSLRLSCAASGSTFSINAMGWYRQAPGKRREWVAGITSGVTHYPDSVKGRFTISRDNAKNTV
YLQMNSLKPEDTAVYYCNLWPPRASPSGSIYWGQGTQVTVSS
3PE92:
(SEQ ID NO: 67)
QVQLQESGGGLVQVGGSLRLSCAASGSTFSINNAMGWYRQAPGKRREVWAGISSGGVTHYPDSVKGRFTISRDNAK
NIVYLQMNSPKPEDTAVYYCNLWPPRASPSGSIYWGQGTQVTVSS
3PE93:
(SEQ ID NO: 68)
QVQLQESGGGLVQPGESLRLSCAVSGSTSSMNAMAWYRQAPGKRRELVAGISGGGATNYPDSMKGRFTISRDNAKN
TVYLQMSSLKPEDTAVYYCNLWPPRASPGGGVYWGQGTQVTVSS
3PE94:
(SEQ ID NO: 69)
QVQLQESGGGLVQPEGSLRLSCAASGSISSINAMAWYRQAPGKRRELVAGIDGGGVTNYPDSVKGRFTISRDNAKNTV
YLQMSSLKPEDTAVYYCNLWPPRASPGGRVYWGQGTQVTVSS
2PE18:
(SEQ ID NO: 70)
QVQLQESGGGLVQAGGSLRLSCADSGSTFGLSAMGWYRQTPGKQRELVASITSDGRTNYADSVKGRFTISRVNPKRT
VYLQMNSLKPDDTAVYVCNARFGIRDFWGQGTQVTVSS
2PE22:
(SEQ ID NO: 71)
QVQLQESGGGLVQPGGSLRLSCADSGSTFGLSAMGWYRQTPGKQRELVASITSDGRTNYADSVKGRFTISRVNPKRT
VYLQMNSLKPDDTAVYVCNARFGIRDFWGQGTQVTVSS
2PE26:
(SEQ ID NO: 72)
QVQLQESGGGLVQAGGSLRLSCADSGSTFGLGAMGWYRQSPGKQRELVASITSGGRTNYADSVKGRFTISRVNAKR
TVYLQMNSLKPEDTAVYVCNARFGIRDFWGQGTQVTVSS
3PE4:
(SEQ ID NO: 73)
QVQLQESGGGLVQAGGSLRLSCADSGSTFGLGAMGWYRQSPGKQRELVASITSGGRTNYSDSVKGRFTISRVNPKRI
VYLQMNSLKPEDTAVYVCNARFGIRDFWGQGTQVTVSS
3PE16:
(SEQ ID NO: 74)
QVQLQESGGGLVQAGGSLRLSCADSGSTFGLSAMGWYRLTPGKQRELVASITSDGRTNYADSVKGRFTISRVNPKRT
VYLQMNSLKPDDTAVYVCNARFGIRDFWGQGTQVTVSS
3PE22:
(SEQ ID NO: 75)
QVQLQESGGGLVQPGGSLRLSCADSGSTFGLGAMGWYRQSPGKQRELVASITSGGRTNYADSVKGRFTISRVGAKR
TVYLQMNSLKPEDTAVYVCNARFGIRDFWGQGTQVTVSS
3PE25:
(SEQ ID NO: 76)
QVQLQESGGGLVQAGGSLRLSCADSGSTFGLTAIGWYRQSPGKQRELVASITSGGRTNYADSVKGRFTISRVNPKRTV
YLQMNSLKPEDTAVYVCNARFGIRDFWGQGTQVTVSS
3PE26:
(SEQ ID NO: 77)
QVQLQESGGGLVQAGGSLRLSCADSGSTFGLGAMGWYRQSPGKQRELVASITSGGRTNYADSVKGRFTISRVGAKR
TVYLQMNSLKPEDTAVYVCNARFGIRDFWGQGTQVTVSS
3PE33:
(SEQ ID NO: 78)
QVQLQESGGGLVQAGGSLRLSCADSGSTFGLGAMGWYRQSPGKQRELVASITSGGRTNYADSVKGRFTISRENPKR
TVYLQMNSLKPEDTAVYVCNARFGIRDFWGQGTQVTVSS
3PE46:
(SEQ ID NO: 79)
QVQLQESGGGLVQAGGSLRLSCADSGSTFGLGAMGWYRQSPGKQRELVASITSGGRTNYADSVKGRFTISRVGAKR
TVYLQMNSLRPEDTAVYVCNARFGIRDFWGQGTQVTVSS
3PE55:
(SEQ ID NO: 80)
QVQLQESGGGLVQAGGSLRLSCADSGSTFGLGAMGWYRQSPGKQRELVASITSGGRTNYADSVKGRFTISRVSAKRT
VYLQMNSLKPEDTAVYVCNARFGIRDFWGQGTQVTVSS
3PE61:
(SEQ ID NO: 81)
QVQLQESGGGLVRPGGSLRLSCADSGSTFGLSAMGWYRQSPGKQRELVASIISDGRTNYADSVKGRFTISRVNAKRT
VYLQMNSLKPEDTAVYVCNARFGIRDFWGQGTQVTVSS
3PE63:
(SEQ ID NO: 82)
QVQLQESGGGLVQAGGSLRLSCADSGSTFGLSAMGWYRQSPGKQRELVASIISDGRTNYADSVKGRFTISRVNAKRT
VYLQMNSLKPEDTAVYVCNARFGIRDFWGQGTQVTVSS
3PE70:
(SEQ ID NO: 83)
QVQLQESGGGLVQAGGSLRLSCADSGSTFGLGAMGWYRQSPGKQRELVASITSGGRTNYSDSVKGRFTISRVTPKRI
VYLQMNSLKPEDTAVYVCNARFGIRDFWGQGTQVTVSS
2PE1:
(SEQ ID NO: 84)
QVQLQESGGGLVQAGGSLRLSCAASGSIFGINAVGWYRQAPGKQRELVATFTRGGDINYADSVKGRFTIFRDNAANTV
YLQMNSLKAEDTAVYYCNTPPRIGRGYWGQGTQVTVSS
2PE35:
(SEQ ID NO: 85)
QVQLQESGGGLVQVGGSLRLSCAASGSIFGINAVGWYRQAPGKQRELVATFTRGGDINYADSVKGRFTIFRDNAANTV
YLQMNSLKAEDTAVYYCNTPPRIGRGYWGQGTQVTVSS
3PE11:
(SEQ ID NO: 86)
QVQLQESGGGLVQPGGSLRLSCAASGSIFGINAVGWYRQAPGKQRELVATFTRGGDINYADSVKGRFTIFRDNAANTV
YLQMNSLKAEDTAVYYCNTPPRIGRGYWGQGTQVTVSS

[0072] By way of example, but not by way of limitation, in some embodiments, a humanized VHH FAP binding agent comprises an amino acid sequence selected from the following sequences:

• P-1901: 2PE14
(SEQ ID NO: 1045)
QVQLQESGGGLVQPGGSLRLSCAASGSTFSINAVAWYRQAPGKRRELVAGISGGGVTNYPDSVKGRFTISRDNAKNT
VYLQMSSLKPEDTAVYYCNLWPPRASPGGRVYWGQGTQVTVSS
• P-1902: 2PE14_opt1 (Q1D_Q5V_A74S_K83R_Q108L; bold letters show the mutation)
(SEQ ID NO: 1046)
DVQLVESGGGLVQPGGSLRLSCAASGSTFSINAVAWYRQAPGKRRELVAGISGGGVTNYPDSVKGRFTISRDNSKNTV
YLQMSSLRPEDTAVYYCNLWPPRASPGGRVYWGQGTLVTVSS
• P-1903: 2PE14_opt2 (Q1D_Q5V_P60A_A74S_K83R_Q108L; bold letters show the mutation)
(SEQ ID NO: 1047)
DVQLVESGGGLVQPGGSLRLSCAASGSTFSINAVAWYRQAPGKRRELVAGISGGGVTNYADSVKGRFTISRDNSKNT
VYLQMSSLRPEDTAVYYCNLWPPRASPGGRVYWGQGTLVTVSS
• P-1904: 2PE14_opt3 (Q1D_Q5V_A74S_S82N_K83R_Q108L; bold letters show the mutation)
(SEQ ID NO: 1048)
DVQLVESGGGLVQPGGSLRLSCAASGSTFSINAVAWYRQAPGKRRELVAGISGGGVTNYPDSVKGRFTISRDNSKNTV
YLQMNSLRPEDTAVYYCNLWPPRASPGGRVYWGQGTLVTVSS
• P-1905: 2PE14_opt4 (Q1D_Q5V_P60A_A74S_S82N_K83R_Q108L; bold letters show the mutation)
(SEQ ID NO: 1049)
DVQLVESGGGLVQPGGSLRLSCAASGSTFSINAVAWYRQAPGKRRELVAGISGGGVTNYADSVKGRFTISRDNSKNT
VYLQMNSLRPEDTAVYYCNLWPPRASPGGRVYWGQGTLVTVSS
• P-1906: 2PE14_N32A (bold letters show the mutation)
(SEQ ID NO: 1050)
QVQLQESGGGLVQPGGSLRLSCAASGSTFSIAAVAWYRQAPGKRRELVAGISGGGVTNYPDSVKGRFTISRDNAKNT
VYLQMSSLKPEDTAVYYCNLWPPRASPGGRVYWGQGTQVTVSS
• P-1907: 2PE14_N32D (bold letters show the mutation)
(SEQ ID NO: 1051)
QVQLQESGGGLVQPGGSLRLSCAASGSTFSIDAVAWYRQAPGKRRELVAGISGGGVTNYPDSVKGRFTISRDNAKNT
VYLQMSSLKPEDTAVYYCNLWPPRASPGGRVYWGQGTQVTVSS
• P-1908: 2PE14_N32E (bold letters show the mutation)
(SEQ ID NO: 1052)
QVQLQESGGGLVQPGGSLRLSCAASGSTFSIEAVAWYRQAPGKRRELVAGISGGGVTNYPDSVKGRFTISRDNAKNT
VYLQMSSLKPEDTAVYYCNLWPPRASPGGRVYWGQGTQVTVSS
• P-1909: 2PE14_N32F (bold letters show the mutation)
(SEQ ID NO: 1053)
QVQLQESGGGLVQPGGSLRLSCAASGSTFSIFAVAWYRQAPGKRRELVAGISGGGVTNYPDSVKGRFTISRDNAKNT
VYLQMSSLKPEDTAVYYCNLWPPRASPGGRVYWGQGTQVTVSS
• P-1910: 2PE14_N32G (bold letters show the mutation)
(SEQ ID NO: 1054)
QVQLQESGGGLVQPGGSLRLSCAASGSTFSIGAVAWYRQAPGKRRELVAGISGGGVTNYPDSVKGRFTISRDNAKNT
VYLQMSSLKPEDTAVYYCNLWPPRASPGGRVYWGQGTQVTVSS
• P-1911: 2PE14_N32H (bold letters show the mutation)
(SEQ ID NO: 1055)
QVQLQESGGGLVQPGGSLRLSCAASGSTFSIHAVAWYRQAPGKRRELVAGISGGGVTNYPDSVKGRFTISRDNAKNT
VYLQMSSLKPEDTAVYYCNLWPPRASPGGRVYWGQGTQVTVSS
• P-1912: 2PE14_N32I (bold letters show the mutation)
(SEQ ID NO: 1056)
QVQLQESGGGLVQPGGSLRLSCAASGSTFSIIAVAWYRQAPGKRRELVAGISGGGVTNYPDSVKGRFTISRDNAKNTV
YLQMSSLKPEDTAVYYCNLWPPRASPGGRVYWGQGTQVTVSS
• P-1913: 2PE14_N32K (bold letters show the mutation)
(SEQ ID NO: 1057)
QVQLQESGGGLVQPGGSLRLSCAASGSTFSIKAVAWYRQAPGKRRELVAGISGGGVTNYPDSVKGRFTISRDNAKNT
VYLQMSSLKPEDTAVYYCNLWPPRASPGGRVYWGQGTQVTVSS
• P-1914: 2PE14_N32L (bold letters show the mutation)
(SEQ ID NO: 1058)
QVQLQESGGGLVQPGGSLRLSCAASGSTFSILAVAWYRQAPGKRRELVAGISGGGVTNYPDSVKGRFTISRDNAKNT
VYLQMSSLKPEDTAVYYCNLWPPRASPGGRVYWGQGTQVTVSS
• P-1915: 2PE14_N32P (bold letters show the mutation)
(SEQ ID NO: 1059)
QVQLQESGGGLVQPGGSLRLSCAASGSTFSIPAVAWYRQAPGKRRELVAGISGGGVTNYPDSVKGRFTISRDNAKNT
VYLQMSSLKPEDTAVYYCNLWPPRASPGGRVYWGQGTQVTVSS
• P-1916: 2PE14_N32Q (bold letters show the mutation)
(SEQ ID NO: 1060)
QVQLQESGGGLVQPGGSLRLSCAASGSTFSIQAVAWYRQAPGKRRELVAGISGGGVTNYPDSVKGRFTISRDNAKNT
VYLQMSSLKPEDTAVYYCNLWPPRASPGGRVYWGQGTQVTVSS
• P-1917: 2PE14_N32R (bold letters show the mutation)
(SEQ ID NO: 1061)
QVQLQESGGGLVQPGGSLRLSCAASGSTFSIRAVAWYRQAPGKRRELVAGISGGGVTNYPDSVKGRFTISRDNAKNT
VYLQMSSLKPEDTAVYYCNLWPPRASPGGRVYWGQGTQVTVSS
• P-1918: 2PE14_N32S (bold letters show the mutation)
(SEQ ID NO: 1062)
QVQLQESGGGLVQPGGSLRLSCAASGSTFSISAVAWYRQAPGKRRELVAGISGGGVTNYPDSVKGRFTISRDNAKNT
VYLQMSSLKPEDTAVYYCNLWPPRASPGGRVYWGQGTQVTVSS
• P-1919: 2PE14_N32T (bold letters show the mutation)
(SEQ ID NO: 1063)
QVQLQESGGGLVQPGGSLRLSCAASGSTFSITAVAWYRQAPGKRRELVAGISGGGVTNYPDSVKGRFTISRDNAKNT
VYLQMSSLKPEDTAVYYCNLWPPRASPGGRVYWGQGTQVTVSS
• P-1920: 2PE14_N32V (bold letters show the mutation)
(SEQ ID NO: 1064)
QVQLQESGGGLVQPGGSLRLSCAASGSTFSIVAVAWYRQAPGKRRELVAGISGGGVTNYPDSVKGRFTISRDNAKNT
VYLQMSSLKPEDTAVYYCNLWPPRASPGGRVYWGQGTQVTVSS
• P-1921: 2PE14_N32W (bold letters show the mutation)
(SEQ ID NO: 1065)
QVQLQESGGGLVQPGGSLRLSCAASGSTFSIWAVAWYRQAPGKRRELVAGISGGGVTNYPDSVKGRFTISRDNAKNT
VYLQMSSLKPEDTAVYYCNLWPPRASPGGRVYWGQGTQVTVSS
• P-1922: 2PE14_N32Y (bold letters show the mutation)
(SEQ ID NO: 1066)
QVQLQESGGGLVQPGGSLRLSCAASGSTFSIYAVAWYRQAPGKRRELVAGISGGGVTNYPDSVKGRFTISRDNAKNT
VYLQMSSLKPEDTAVYYCNLWPPRASPGGRVYWGQGTQVTVSS
• P-1923: 3PE42 (bold letters show the mutation)
(SEQ ID NO: 1067)
QVQLQESGGGLVQPGESLRLSCAVSGSTSSMNAMAWYRQAPGKRRELVAGISGGGATNYPDSVKGRFTISRDNAKN
TVYLQMSSLKPEDTAVYYCNLWPPRASPGGGVYWGQGTQVTVSS
• P-1924: 3PE42_M31A (bold letters show the mutation)
(SEQ ID NO: 1068)
QVQLQESGGGLVQPGESLRLSCAVSGSTSSANAMAWYRQAPGKRRELVAGISGGGATNYPDSVKGRFTISRDNAKN
TVYLQMSSLKPEDTAVYYCNLWPPRASPGGGVYWGQGTQVTVSS
• P-1925: 3PE42_M31D (bold letters show the mutation)
(SEQ ID NO: 1069)
QVQLQESGGGLVQPGESLRLSCAVSGSTSSDNAMAWYRQAPGKRRELVAGISGGGATNYPDSVKGRFTISRDNAKN
TVYLQMSSLKPEDTAVYYCNLWPPRASPGGGVYWGQGTQVTVSS
• P-1926: 3PE42_M31E (bold letters show the mutation)
(SEQ ID NO: 1070)
QVQLQESGGGLVQPGESLRLSCAVSGSTSSENAMAWYRQAPGKRRELVAGISGGGATNYPDSVKGRFTISRDNAKNT
VYLQMSSLKPEDTAVYYCNLWPPRASPGGGVYWGQGTQVTVSS
• P-1927: 3PE42_M31F (bold letters show the mutation)
(SEQ ID NO: 1071)
QVQLQESGGGLVQPGESLRLSCAVSGSTSSFNAMAWYRQAPGKRRELVAGISGGGATNYPDSVKGRFTISRDNAKNT
VYLQMSSLKPEDTAVYYCNLWPPRASPGGGVYWGQGTQVTVSS
• P-1928: 3PE42_M31G (bold letters show the mutation)
(SEQ ID NO: 1072)
QVQLQESGGGLVQPGESLRLSCAVSGSTSSGNAMAWYRQAPGKRRELVAGISGGGATNYPDSVKGRFTISRDNAKN
TVYLQMSSLKPEDTAVYYCNLWPPRASPGGGVYWGQGTQVTVSS
• P-1929: 3PE42_M31H (bold letters show the mutation)
(SEQ ID NO: 1073)
QVQLQESGGGLVQPGESLRLSCAVSGSTSSHNAMAWYRQAPGKRRELVAGISGGGATNYPDSVKGRFTISRDNAKN
TVYLQMSSLKPEDTAVYYCNLWPPRASPGGGVYWGQGTQVTVSS
• P-1930: 3PE42_M31I (bold letters show the mutation)
(SEQ ID NO: 1074)
QVQLQESGGGLVQPGESLRLSCAVSGSTSSINAMAWYRQAPGKRRELVAGISGGGATNYPDSVKGRFTISRDNAKNT
VYLQMSSLKPEDTAVYYCNLWPPRASPGGGVYWGQGTQVTVSS
• P-1931: 3PE42_M31K (bold letters show the mutation)
(SEQ ID NO: 1075)
QVQLQESGGGLVQPGESLRLSCAVSGSTSSKNAMAWYRQAPGKRRELVAGISGGGATNYPDSVKGRFTISRDNAKN
TVYLQMSSLKPEDTAVYYCNLWPPRASPGGGVYWGQGTQVTVSS
• P-1932: 3PE42_M31L (bold letters show the mutation)
(SEQ ID NO: 1076)
QVQLQESGGGLVQPGESLRLSCAVSGSTSSLNAMAWYRQAPGKRRELVAGISGGGATNYPDSVKGRFTISRDNAKNT
VYLQMSSLKPEDTAVYYCNLWPPRASPGGGVYWGQGTQVTVSS
• P-1933: 3PE42_M31N (bold letters show the mutation)
(SEQ ID NO: 1077)
QVQLQESGGGLVQPGESLRLSCAVSGSTSSNNAMAWYRQAPGKRRELVAGISGGGATNYPDSVKGRFTISRDNAKN
TVYLQMSSLKPEDTAVYYCNLWPPRASPGGGVYWGQGTQVTVSS
• P-1934: 3PE42_M31P (bold letters show the mutation)
(SEQ ID NO: 1078)
QVQLQESGGGLVQPGESLRLSCAVSGSTSSPNAMAWYRQAPGKRRELVAGISGGGATNYPDSVKGRFTISRDNAKNT
VYLQMSSLKPEDTAVYYCNLWPPRASPGGGVYWGQGTQVTVSS
• P-1935: 3PE42_M31Q (bold letters show the mutation)
(SEQ ID NO: 1079)
QVQLQESGGGLVQPGESLRLSCAVSGSTSSQNAMAWYRQAPGKRRELVAGISGGGATNYPDSVKGRFTISRDNAKN
TVYLQMSSLKPEDTAVYYCNLWPPRASPGGGVYWGQGTQVTVSS
• P-1936: 3PE42_M31R (bold letters show the mutation)
(SEQ ID NO: 1080)
QVQLQESGGGLVQPGESLRLSCAVSGSTSSRNAMAWYRQAPGKRRELVAGISGGGATNYPDSVKGRFTISRDNAKN
TVYLQMSSLKPEDTAVYYCNLWPPRASPGGGVYWGQGTQVTVSS
• P-1937: 3PE42_M31S (bold letters show the mutation)
(SEQ ID NO: 1081)
QVQLQESGGGLVQPGESLRLSCAVSGSTSSSNAMAWYRQAPGKRRELVAGISGGGATNYPDSVKGRFTISRDNAKNT
VYLQMSSLKPEDTAVYYCNLWPPRASPGGGVYWGQGTQVTVSS
• P-1938: 3PE42_M31T (bold letters show the mutation)
(SEQ ID NO: 1082)
QVQLQESGGGLVQPGESLRLSCAVSGSTSSTNAMAWYRQAPGKRRELVAGISGGGATNYPDSVKGRFTISRDNAKNT
VYLQMSSLKPEDTAVYYCNLWPPRASPGGGVYWGQGTQVTVSS
• P-1939: 3PE42_M31V (bold letters show the mutation)
(SEQ ID NO: 1083)
QVQLQESGGGLVQPGESLRLSCAVSGSTSSVNAMAWYRQAPGKRRELVAGISGGGATNYPDSVKGRFTISRDNAKNT
VYLQMSSLKPEDTAVYYCNLWPPRASPGGGVYWGQGTQVTVSS
• P-1940: 3PE42_M31W (bold letters show the mutation)
(SEQ ID NO: 1084)
QVQLQESGGGLVQPGESLRLSCAVSGSTSSWNAMAWYRQAPGKRRELVAGISGGGATNYPDSVKGRFTISRDNAKN
TVYLQMSSLKPEDTAVYYCNLWPPRASPGGGVYWGQGTQVTVSS
• P-1941: 3PE42_M31Y (bold letters show the mutation)
(SEQ ID NO: 1085)
QVQLQESGGGLVQPGESLRLSCAVSGSTSSYNAMAWYRQAPGKRRELVAGISGGGATNYPDSVKGRFTISRDNAKNT
VYLQMSSLKPEDTAVYYCNLWPPRASPGGGVYWGQGTQVTVSS
• P-2219: 2PE14_OptA (Q1D_Q5V_N32W_A74S_K83R_Q108L)
(SEQ ID NO: 1086)
DVQLVESGGGLVQPGGSLRLSCAASGSTFSIWAVAWYRQAPGKRRELVAGISGGGVTNYPDSVKGRFTISRDNSKNTVYL
QMSSLRPEDTAVYYCNLWPPRASPGGRVYWGQGTLVTVSS
• P-2220: 2PE14_OptB (Q1D_Q5V_N32W_A74S_S82N_K83R_Q108L)
(SEQ ID NO: 1087)
DVQLVESGGGLVQPGGSLRLSCAASGSTFSIWAVAWYRQAPGKRRELVAGISGGGVTNYPDSVKGRFTISRDNSKNTVYL
QMNSLRPEDTAVYYCNLWPPRASPGGRVYWGQGTLVTVSS
• P-1923: 3PE42
(SEQ ID NO: 1088)
QVQLQESGGGLVQPGESLRLSCAVSGSTSSMNAMAWYRQAPGKRRELVAGISGGGATNYPDSVKGRFTISRDNAKN
TVYLQMSSLKPEDTAVYYCNLWPPRASPGGGVYWGQGTQVTVSSHHHHHH
• P-2221: 3PE42_OptA (Q1D_Q5V_M31A_N32W_A74S_K83R_Q108L)
(SEQ ID NO: 1089)
DVQLVESGGGLVQPGGSLRLSCAASGSTSSAWAMAWYRQAPGKRRELVAGISGGGATNYPDSVKGRFTISRDNSKNTVY
LQMSSLRPEDTAVYYCNLWPPRASPGGGVYWGQGTLVTVSS
• P-2222: 3PE42_OptB (Q1D_Q5V_M31D_N32W_A74S_K83R_Q108L)
(SEQ ID NO: 1090)
DVQLVESGGGLVQPGGSLRLSCAASGSTSSDWAMAWYRQAPGKRRELVAGISGGGATNYPDSVKGRFTISRDNSKNTVY
LQMSSLRPEDTAVYYCNLWPPRASPGGGVYWGQGTLVTVSS
• P-2223: 3PE42_OptC (Q1D_Q5V_M31A_N32W_A74S_S82N_K83R_Q108L)
(SEQ ID NO: 1091)
DVQLVESGGGLVQPGGSLRLSCAASGSTSSAWAMAWYRQAPGKRRELVAGISGGGATNYPDSVKGRFTISRDNSKNTVY
LQMNSLRPEDTAVYYCNLWPPRASPGGGVYWGQGTLVTVSS
• P-2224: 3PE42_OptD (Q1D_Q5V_M31D_N32W_A74S_S82N_K83R_Q108L)
(SEQ ID NO: 1092)
DVQLVESGGGLVQPGGSLRLSCAASGSTSSDWAMAWYRQAPGKRRELVAGISGGGATNYPDSVKGRFTISRDNSKNTVY
LQMNSLRPEDTAVYYCNLWPPRASPGGGVYWGQGTLVTVSS

[0073] In some embodiments, the FAP binding agent comprises a targeting moiety which is a VHH comprising a single amino acid chain having four “framework regions” or FRs and three “complementary determining regions” or CDRs. As used herein, “framework region” or “FR” refers to a region in the variable domain that is located between the CDRs. As used herein, “complementary determining region” or “CDR” refers to variable regions in VHHs that contains the amino acid sequences capable of specifically binding to antigenic targets.

[0074] In some embodiments, the FAP binding agent comprises a VHH having a variable domain comprising at least one CDR1, CDR2, and/or CDR3 sequences. In some embodiments, the FAP binding agent comprises a VHH having a variable region comprising at least one FR1, FR2, FR3, and FR4 sequences.

[0075] In some embodiments, a human FAP binding agent comprises a CDR1 sequence selected from:

(SEQ ID NO: 87)
ATISSMNSMA;
(SEQ ID NO: 88)
EFTLAYFGVG;
(SEQ ID NO: 89)
ESTFSINAVA;
(SEQ ID NO: 90)
GFIFRSTSMG;
(SEQ ID NO: 91)
GGIFTIGPLG;
(SEQ ID NO: 92)
GRDFRDNSMG;
(SEQ ID NO: 93)
GSIFGINAVG;
(SEQ ID NO: 94)
GSIFSLNAMA;
(SEQ ID NO: 95)
GSIFSMG;
(SEQ ID NO: 96)
GSIFSTNAMA;
(SEQ ID NO: 97)
GSISSINAMA;
(SEQ ID NO: 98)
GSISSLNAMG;
(SEQ ID NO: 99)
GSISSRNAMG;
(SEQ ID NO: 100)
GSSFIINAMG;
(SEQ ID NO: 101)
GSTARLDAMG;
(SEQ ID NO: 102)
GSTFGLGAMG;
(SEQ ID NO: 103)
GSTFGLSAMG;
(SEQ ID NO: 104)
GSTFGLTAIG;
(SEQ ID NO: 105)
GSTFILNAMA;
(SEQ ID NO: 106)
GSTFILNAMG;
(SEQ ID NO: 107)
GSTFSGNAMA;
(SEQ ID NO: 108)
GSTFSINAMA;
(SEQ ID NO: 109)
GSTFSINAMG;
(SEQ ID NO: 110)
GSTFSINAMM;
(SEQ ID NO: 111)
GSTFSINAVA;
(SEQ ID NO: 112)
GSTFSINNAMG;
(SEQ ID NO: 113)
GSTFSINSMG;
(SEQ ID NO: 114)
GSTFSSNAMA;
(SEQ ID NO: 115)
GSTFSVNAVA.

[0076] In some embodiments, a human FAP binding agent comprises a CDR2 sequence selected from:

(SEQ ID NO: 116)
AISSGGSTNYMSVKG;
(SEQ ID NO: 117)
AVTSGGVTNYADSVKG;
(SEQ ID NO: 118)
GIATDGRTNYAHSVKG;
(SEQ ID NO: 119)
GIDGGGVTNYPDSVKG;
(SEQ ID NO: 120)
GIDSADITDYARFVKG;
(SEQ ID NO: 121)
GIIGSHSTNYADSVKG;
(SEQ ID NO: 122)
GISGDNITNYPDSVKG;
(SEQ ID NO: 123)
GISGDNITNYPNSVKG;
(SEQ ID NO: 124)
GISGGDVTHYPDSVKG;
(SEQ ID NO: 125)
GISGGGATNYPDSMKG;
(SEQ ID NO: 126)
GISGGGATNYPDSVKG;
(SEQ ID NO: 127)
GISGGGVTNHPDSVKG;
(SEQ ID NO: 128)
GISGGGVTNYPDSVKG;
(SEQ ID NO: 129)
GISGGGVTNYPDSVRG;
(SEQ ID NO: 130)
GISGGGVTSYPDSVKG;
(SEQ ID NO: 131)
GISGGITTYPDSVKG;
(SEQ ID NO: 132)
GISGGSVTNYPDSVKG;
(SEQ ID NO: 133)
GISGGVTNYPDSVKG;
(SEQ ID NO: 134)
GISSDDITYYPDSVKG;
(SEQ ID NO: 135)
GISSDGATHYPDSVKG;
(SEQ ID NO: 136)
GISSGGDTNYPDSVKG;
(SEQ ID NO: 137)
GISSGGVTHYPDSVKG;
(SEQ ID NO: 138)
GISSSGPPHYPDSVKG;
(SEQ ID NO: 139)
GITSDGITNYADSVKG;
(SEQ ID NO: 140)
GITSDGLGNYVDFVKG;
(SEQ ID NO: 141)
GITSDGLGNYVGFAKG;
(SEQ ID NO: 142)
GITSDGVTKYPDSVKG;
(SEQ ID NO: 143)
GITSDGVTNYPDSVKG;
(SEQ ID NO: 144)
GITSDSVTKYPDSVKG.

[0077] In some embodiments, a human FAP binding agent comprises a CDR3 sequence selected from:

(SEQ ID NO: 145)
AAVVTAKGMGAIQSRGY;
(SEQ ID NO: 146)
ADSSRGKIYFSNYRSWNY;
(SEQ ID NO: 147)
ARFGIRDF;
(SEQ ID NO: 148)
FWPPLYGRP;
(SEQ ID NO: 149)
FWPPPSDRPI;
(SEQ ID NO: 150)
FWPPPSGRPI;
(SEQ ID NO: 151)
KWPPSVPPN;
(SEQ ID NO: 152)
LWPPMASPSGAIY;
(SEQ ID NO: 153)
LWPPRAPPDGRVY;
(SEQ ID NO: 154)
LWPPRAPPGGRVY;
(SEQ ID NO: 155)
LWPPRASPDGGVY;
(SEQ ID NO: 156)
LWPPRASPDGRVY;
(SEQ ID NO: 157)
LWPPRASPGGGVY;
(SEQ ID NO: 158)
LWPPRASPGGLVY;
(SEQ ID NO: 159)
LWPPRASPGGRVY;
(SEQ ID NO: 160)
LWPPRASPSGAVY;
(SEQ ID NO: 161)
LWPPRASPSGRGY;
(SEQ ID NO: 162)
LWPPRASPSGRID;
(SEQ ID NO: 163)
LWPPRASPSGRIY;
(SEQ ID NO: 164)
LWPPRASPSGRLY;
(SEQ ID NO: 165)
LWPPRASPSGRPY;
(SEQ ID NO: 166)
LWPPRASPSGRVY;
(SEQ ID NO: 167)
LWPPRASPSGSIY;
(SEQ ID NO: 168)
LWPPRASPSGTIY;
(SEQ ID NO: 169)
LWPPRVSPGGGVY;
(SEQ ID NO: 170)
LWPPRVSPGGRVY;
(SEQ ID NO: 171)
LWPPRVSPSGRGY;
(SEQ ID NO: 172)
LWPPRVSPSGRIY;
(SEQ ID NO: 173)
LYPPASSGR;
(SEQ ID NO: 174)
MYRPGTYDY;
(SEQ ID NO: 175)
QWPPRALDA.

[0078] By way of example, but not by way of limitation, in some embodiments, a human VHH FAP binding agent comprises an amino acid sequence selected from the following sequences:

2PE48:
(SEQ ID NO: 837)
QVQLQESGGGLVQPGGSLRLSCAVSGTMLSRNAMGWYRQAPGKPRQWAGITSDGLGNYVGFAKGRFTISRDNAKN
TVYLQMNTLKPDDTAVYHCNFWPPPSGRPIWGQGTQVTVSS
3PE60:
(SEQ ID NO: 838)
QVQLQESGGGLVQPGGSLRLSCAVSGTMLSRNAMGWYRQAPGKQRQVWAGITSDGLGNYVDFVKGRFTISRDNAR
NTVYLQMNTLKPDDTAVYYCNFWPPPSDRPIWGQGTQVTVSS
2PE34:
(SEQ ID NO: 839)
QVQLQESGGGLVQAGGSLRLSCAVSGSTARLDAMGWYRQAPGKQREWVAGIDSADITDYARFVKGRFTISRDNAKNT
VYLQMNSLKPEDTAVYYCNKWPPSVPPNWGHGTQVTVSS
3PE80:
(SEQ ID NO: 840)
QVQLQESGGGLVQAGGSLRLSCAVSGSTARLDAMGWYRQAPGKQREWVAGIDSADITDYARFVKGRFTISRDNAKNT
VYLQMNSLKPEDTAVYYCNKWPPSVPPNWGQGTQVTVSS
2PE54:
(SEQ ID NO: 841)
QVQLQESGGGLVQAGGSLRLSCVHSGGIFTIGPLGWYRQAPGSQRELVATVTNGGGTYYADSVKGRFTISRDNAKNT
VYLQMNSLKPEDTAVYYCNAAWTAKGMGAIQSRGYWGQGTQVTVSS
3PE81:
(SEQ ID NO: 842)
QVQLQESGGGLVQAGGSLRLSCAHSGGIFTIGPLGWYRQAPGSQRELVATVTNGGGTYYADSVKGRFTISRDNAKNT
VYLQMNSLKPEDTAVYYCNAAWTAKGMGAIQSRGYWGQGTQVTVSS
2PE10:
(SEQ ID NO: 843)
QVQLQESGGGLVQAGGSLRLSCAASGSTFSINAMMWYRQAPGKQRELVASIGSGGNTYYADSVKGRFTISRDNGKST
LYLQMNSLKPEDTAVYYCKMYRPGTYDYWGQGTQVTVSS
3PE66:
(SEQ ID NO: 844)
QVQLQESGGGWVQPGGSLRLSCAASGSTFSINAMMWYRQAPGKQRELVASIGSGGNTYYADSVKGRFTISRDNGKS
TLYLQMNSLKPEDTAVYYCKMYRPGTYDYWGQGTQVTVSS
2PE31:
(SEQ ID NO: 845)
QVQLQESGGGLVQAGGSLSVSCAASGSIFSMGWFRQAPGKQRELVAAVTSGGVTNYADSVKGRFTISRDNAKNTVYL
QMKSLKPEDTAVYYCAADSSRGKIYFSNYRSWNYWGQGTQVTVSS
2PE79:
(SEQ ID NO: 846)
QVQLQESGGGLVQAGESLRLSCAVSATISSMNSMAWYRQAPGKQREWVAGLETGGRANYVDSVKGRFTISRDNARN
TVLLQMNSLKPEDTAVYYCNRWPPLRSSWGQGTQVTVSS
2PE91:
(SEQ ID NO: 847)
QVQLQESGGGLVQPGESLRLSCAASGSISSRNAMGWYRQAPGKEREVWAGITSDGITNYADSVKGRFTISRDNAKNT
VGLQMNSLKPDDTAVYYCNFWPPLYGRPWGQGTQVTVSS
3PE38:
(SEQ ID NO: 848)
QVQLQESGGGLVQPGGSLRLSCAASGFIFRSTSMGWYRQAPGKQREFVAGIIGSHSTNYADSVKGRFTISRDNAQNA
VYLHMNTLKPEDTAVYYCNLYPPASSGRWGKGTQVTVSS
2PE57:
(SEQ ID NO: 849)
QVQLQESGGGLVQAGGSLRLSCAASLKISSINAMAWYRQAAGKQRELVAGIATDGRTNYAHSVKGRFTISRDNAKNTV
YLQMNSLKPEDTAVYYCNQWPPRALDAWGQGTQVTVSS
3PE15:
(SEQ ID NO: 850)
QVQLQESGGGLVQPGGSLRLSCAASGVTFGIGAMGWYRQTPENERELVAAISSGGSTNYAASVKGRFTISRDNAPNT
VYLQMNSLKPEDTAIYYCNVRRGLAWYPGWGQGTQVTVSS

[0079] In some embodiments, the FAP binding agent comprises a VHH having a variable domain comprising at least one CDR1, CDR2, and/or CDR3 sequences. In some embodiments, the FAP binding agent comprises a VHH having a variable region comprising at least one FR1, FR2, FR3, and FR4 sequences.

[0080] In some embodiments, a human FAP binding agent comprises a CDR1 sequence selected from:

(SEQ ID NO: 851)
GSTFSVNAVG;
(SEQ ID NO: 852)
GSTFTINAMA;
(SEQ ID NO: 853)
GSTFTINAMG;
(SEQ ID NO: 854)
GSTSSINAMA;
(SEQ ID NO: 855)
GSTSSMNAMA;
(SEQ ID NO: 856)
GTMLSRNAMG;
(SEQ ID NO: 857)
GVELSRSAMA;
(SEQ ID NO: 858)
GVTFGIGAMG;
(SEQ ID NO: 859)
LKISSINAMA;
(SEQ ID NO: 860)
SGSTFSINAMA;
(SEQ ID NO: 861)
VNIVNLNSVG.

[0081] In some embodiments, a human FAP binding agent comprises a CDR2 sequence selected from:

(SEQ ID NO: 862)
GITSGGSTNYADSVKG;
(SEQ ID NO: 863)
GITSGVTHYPDSVKG;
(SEQ ID NO: 864)
GITSSGVTKYPDSVKG;
(SEQ ID NO: 865)
GITSSGVTNYPDSVKG;
(SEQ ID NO: 866)
GITSSGVTQYPDSVKG;
(SEQ ID NO: 867)
GITTDGITKYPDSLKG;
(SEQ ID NO: 868)
GLETGGRANYVDSVKG;
(SEQ ID NO: 869)
SIGSGGNTYYADSVKG;
(SEQ ID NO: 870)
SHSDGRTNYADSVKG;
(SEQ ID NO: 871)
SITSAGSTNYAESVKG;
(SEQ ID NO: 872)
SITSDGRTNYADSVKG;
(SEQ ID NO: 873)
SITSGGRTNYADSVKG;
(SEQ ID NO: 874)
SITSGGRTNYSDSVKG;
(SEQ ID NO: 875)
TFTRGGDINYADSVKG;
(SEQ ID NO: 876)
TVTNGGGTYYADSVKG.

[0082] In some embodiments, a human FAP binding agent comprises a CDR3 sequence selected from:

(SEQ ID NO: 877)
RWPPLRSS;
(SEQ ID NO: 878)
TPPRIGRGY;
(SEQ ID NO: 879)
VRRGLAWYPG.

[0083] In some embodiments, a human FAP binding agent comprises a CDR1 sequence selected from:

(SEQ ID NO: 1093)
GSTFSIAAVA;
(SEQ ID NO: 1094)
GSTFSIDAVA;
(SEQ ID NO: 1095)
GSTFSIEAVA;
(SEQ ID NO: 1096)
GSTFSIFAVA;
(SEQ ID NO: 1097)
GSTFSIGAVA;
(SEQ ID NO: 1098)
GSTFSIHAVA;
(SEQ ID NO: 1099)
GSTFSIIAVA;
(SEQ ID NO: 1100)
GSTFSIKAVA;
(SEQ ID NO: 1101)
GSTFSILAVA;
(SEQ ID NO: 1102)
GSTFSIPAVA;
(SEQ ID NO: 1103)
GSTFSIQAVA;
(SEQ ID NO: 1104)
GSTFSIRAVA;
(SEQ ID NO: 1105)
GSTFSISAVA;
(SEQ ID NO: 1106)
GSTFSITAVA;
(SEQ ID NO: 1107)
GSTFSIVAVA;
(SEQ ID NO: 1108)
GSTFSIWAVA;
(SEQ ID NO: 1109)
GSTFSIYAVA;
(SEQ ID NO: 1110)
GSTSSANAMA;
(SEQ ID NO: 1111)
GSTSSDNAMA;
(SEQ ID NO: 1112)
GSTSSENAMA;
(SEQ ID NO: 1113)
GSTSSFNAMA;
(SEQ ID NO: 1114)
GSTSSGNAMA;
(SEQ ID NO: 1115)
GSTSSHNAMA;
(SEQ ID NO: 1116)
GSTSSINAMA;
(SEQ ID NO: 1117)
GSTSSKNAMA;
(SEQ ID NO: 1118)
GSTSSLNAMA;
(SEQ ID NO: 1119)
GSTSSNNAMA;
(SEQ ID NO: 1120)
GSTSSPNAMA;
(SEQ ID NO: 1121)
GSTSSQNAMA;
(SEQ ID NO: 1122)
GSTSSRNAMA;
(SEQ ID NO: 1123)
GSTSSSNAMA;
(SEQ ID NO: 1124)
GSTSSTNAMA;
(SEQ ID NO: 1125)
GSTSSVNAMA;
(SEQ ID NO: 1126)
GSTSSWNAMA;
(SEQ ID NO: 1127)
GSTSSYNAMA;
(SEQ ID NO: 1128)
GSTSSAWAMA;
(SEQ ID NO: 1129)
GSTSSDWAMA

[0084] In some embodiments, the FAP binding agent of the present invention is a human FAP antibody (e.g., NI-206.82C2, NI-206.59B4, NI-206.22F7, NI-206.27E8, NI-206.12G4) or a portion thereof (such as, VH chain, VL chain, CDR1, CDR2 or CDR3) as described in International Patent Publication No. WO 2016/110598 (which is hereby incorporated by reference in its entirety) wherein the amino acid sequences of VH chains, VL chains and their CDRs are as follows:

[0085] FAP Binding Agent NI-206.82C2

NI-206.82C2 VH:
(SEQ ID NO: 880)
QVQLQQSGPGLVKPSQTLSLTCAISGDSVSSNSVTWNWIRQSPSRGLEW
LGRTYYRSKWYNDYAVSVKGRITINPDTSKNQFYLQLKSVTPEDAAVYY
CARDSSILYGDYWGQGTLVTVSS
NI-206.82C2 VL:
(SEQ ID NO: 881)
QAVLTQPSSLSASPGASASLTCTLPSGINVGTYRIFWFQQKPGSPPQYL
LSYKSDSDNHQGSGVPSRFSGSKDASANAGILLISGLQSEDEADYYCMI
WHSSAWVFGGGTKLTVL

[0086] The FAP binding agent of the present invention may include CDR1, CDR2, or CDR3 of the VH or VL chain of NI-206.8202. The VH chain of NI-206.82C2 includes the following CDRs:

| (SEQ ID NO: 882) | |
|---|---|
| CDR1: | GDSVSSNSVTWN |
| (SEQ ID NO: 883) | |
| CDR2: | RTYYRSKWYND |
| (SEQ ID NO: 884) | |
| CDR3: | DSSILYGDY |

[0087] The VL chain of NI-206.82C2 includes the following CDRs:

| (SEQ ID NO: 915) | |
|---|---|
| CDR1: | TLPSGINVGTYRIF |
| (SEQ ID NO: 916) | |
| CDR2: | KSDSDNH |
| (SEQ ID NO: 917) | |
| CDR3: | MIWHSSAWV |

[0088] FAP Binding Agent NI-206.59B4

NI-206.59B4 VH:
(SEQ ID NO: 918)
QVQLVQSGAEVKKPGASVKVSCKTSGYTFTDYYIHWRQAPGQGLEWMGW
INPNRGGTNYAQKFQGRVTMTRDTSIATAYMELSRLRSDDTAVYYCATA
SLKIAAVGTFDCWGQGTLVTVSS
NI-206.59B4 VL:
(SEQ ID NO: 919)

SYELTQPPSVSVSPGQTARITCSGDALSKQYAFWFQQKPGQAPILVIYQ

DTKRPSGIPGRFSGSSSGTTVTLTISGAQADDEADYYCQSADSSGTYVF
GTGTKVTVL

[0089] The FAP binding agent of the present invention may include CDR1, CDR2, or CDR3 of the VH or VL chain of NI-206.59B4. The VH chain of NI-206.59B4 includes the following CDRs:

| (SEQ ID NO: 920) | |
|---|---|
| CDR1: | GYTFTDYYIH |
| (SEQ ID NO: 921) | |
| CDR2: | WINPNRGGTN |
| (SEQ ID NO: 922) | |
| CDR3: | ASLKIAAVGTFDC |

[0090] The VL chain of NI-206.82C2 includes the following CDRs:

| (SEQ ID NO: 923) | |
|---|---|
| CDR1: | SGDALSKQYAF |
| (SEQ ID NO: 924) | |
| CDR2: | QDTKRPS |
| (SEQ ID NO: 925) | |
| CDR3: | QSADSSGTYV |

[0091] FAP Binding Agent NI-206.22F7

NI-206.22F7 VH:
(SEQ ID NO: 926)
EVQLVETGGGWQPGRSLRLSCAASGFSFSTHGMYWRQPPGKGLEWVAVI
SYDGSDKKYADSVKGRFTISRDNSKNTVYLEMSSVRAEDTALYYCFCRR
DAFDLWGQGTMVTVSS
NI-206.22F7 VL:
(SEQ ID NO: 927)
SYVLTQPPSVSVSPGQTARITCSGDALPKKYAYWYQQKSGQAPVLVIYE
DTKRPSGIPERFSGSSSGTMATLTISGAQVEDEADYYCYSTDSSGNYWV
FGGGTEVTVL

[0092] The FAP binding agent of the present invention may include CDR1, CDR2, or CDR3 of the VH or VL chain of NI-206.22F7. The VH chain of NI-206.22F7 includes the following CDRs:

| (SEQ ID NO: 928) | |
|---|---|
| CDR1: | GFSFSTHGMY |
| (SEQ ID NO: 929) | |
| CDR2: | VISYDGSDKK |
| (SEQ ID NO: 930) | |
| CDR3: | RRDAFDL |

[0093] The VL chain of NI-206.22F7 includes the following CDRs:

| (SEQ ID NO: 931) | |
|---|---|
| CDR1: | SGDALPKKYAY |
| (SEQ ID NO: 932) | |
| CDR2: | EDTKRPS |
| (SEQ ID NO: 933) | |
| CDR3: | YSTDSSGNYWW |

[0094] FAP Binding Agent NI-206.27E8

NI-206.27E8 VH:
(SEQ ID NO: 934)
EVQLVESGGGLVEPGGSLRLSCAASGFTFSDAWMNWVRQAPGKGLEWGR
IKTKSDGGTTDYAAPVRGRFSISRDDSKNTLFLEMNSLKTEDTAIYYCF
ITVIWSSESPLDHWGQGTLVTVSS
NI-206.27E8 VL:
(SEQ ID NO: 935)
SYELTQPPSVSVSPGQTARITCSGDELPKQYAYWYQQKPGQAPVLVIYK
DRQRPSGIPERFSGSSSGTTVTLTISGVQAEDEADYYCQSAYSINTYVI
FGGGTKLTVL

[0095] The FAP binding agent of the present invention may include CDR1, CDR2, or CDR3 of the VH or VL chain of NI-206.27E8. The VH chain of NI-206.27E8 includes the following CDRs:

| (SEQ ID NO: 936) | |
|---|---|
| CDR1: | GFTFSDAWMN |
| (SEQ ID NO: 937) | |
| CDR2: | RIKTKSDGGTTD |
| (SEQ ID NO: 938) | |
| CDR3: | TVIWSSESPLDH |

[0096] The VL chain of NI-206.27E8 includes the following CDRs:

| (SEQ ID NO: 939) | |
|---|---|
| CDR1: | SGDELPKQYAY |
| (SEQ ID NO: 940) | |
| CDR2: | KDRQRPS |
| (SEQ ID NO: 941) | |
| CDR3: | QSAYSINTYVI |

[0097] FAP Binding Agent NI-206.12G4

NI-206.12G4 VH:
(SEQ ID NO: 942)
EVQLVESGGGLVKPGGSLRLSCAASGFTFSDYYMSWIRQAPGKGLEWISY
ISSGSSYTNYADSVKGRFTISRDNAKKSVYLEVNGLTVEDTAVYYCARVR
YGDREMATIGGFDFWGQGTLVTVSS
NI-206.12G4 VL:
(SEQ ID NO: 943)
SYELTQPPSVSVSPGQTARITCSGDALPKQYAYWYQQSPGQAPVLVIYKD
SERPSGIPERFSGSSSGTTVTLTISGVQAEDEADYYCQSADSGGTSRIFG
GGTKLTVL

[0098] The FAP binding agent of the present invention may include CDR1, CDR2, or CDR3 of the VH or VL chain of NI-206.12G4. The VH chain of NI-206.12G4 includes the following CDRs:

CDR1:
(SEQ ID NO: 944)
GFTFSDYYMS
CDR2:
(SEQ ID NO: 945)
YISSGSSYTN
CDR3:
(SEQ ID NO: 946)
VRYGDREMATIGGFDF

[0099] The VL chain of NI-206.12G4 includes the following CDRs:

CDR1:
(SEQ ID NO: 947)
SGDALPKQYAY
CDR2:
(SEQ ID NO: 948)
KDSERPS
CDR3:
(SEQ ID NO: 949)
QSADSGGTSRI

[0100] FAP Binding Agent NI-206.17A6

NI-206.17A6 VH:
(SEQ ID NO: 950)
QVQLQESGPGLVRSTETLSLTCLVSGDSINSHYWSWLRQSPGRGLEWIGY
IYYTGPTNYNPSLKSRVSISLGTSKDQFSLKLSSVTAADTARYYCARNKV
FWRGSDFYYYMDVWGKGTTVTVSS
NI-206.17A6 VL:
(SEQ ID NO: 951)
EIVLTQSPGTLSLSLGERATLSCRASQSLANNYLAWYQQKPGQAPRLLMY
DASTRATGIPDRFSGSGSGTDFTLTISRLEPEDFAVYYCQQFVTSHHMYI
FGQGTKVEIK

[0101] The FAP binding agent of the present invention may include CDR1, CDR2, or CDR3 of the VH or VL chain of NI-206.17A6. The VH chain of NI-206.17A6 includes the following CDRs:

CDR1:
(SEQ ID NO: 952)
GDSINSHYWS
CDR2:
(SEQ ID NO: 953)
YIYYTGPTN
CDR3:
(SEQ ID NO: 954)
NKVFWRGSDFYYYMDV

[0102] The VL chain of NI-206.17A6 includes the following CDRs:

CDR1:
(SEQ ID NO: 955)
RASQSLANNYLA
CDR2:
(SEQ ID NO: 956)
DASTRAT
CDR3:
(SEQ ID NO: 957)
QQFVTSHHMYI

[0103] In some embodiments, the FAP binding agent of the present invention is a FAP antibody (e.g., humanized F19) or a portion thereof (such as, VH chain, VL chain, CDR1, CDR2 or CDR3) from International Patent Publication No. WO 1999/057151 (which is hereby incorporated by reference in its entirety) wherein the amino acid sequences of VH chain, VL chain and their CDRs are as follows:

Humanized F19 VH:
(SEQ ID NO: 958)
QVQLVQSGAEVKKPGASVKVSCKTSRYTFTEYTIHWRQAPGQRLEWIG
GINPNNGIPNYNQKFKGRVTITVDTSASTAYMELSSLRSEDTAVYYCA
RRRIAYGYDEGHAMDYWGQGTLVTVSS
Humanized F19 VL:
(SEQ ID NO: 959)
DIVMTQSPDSLAVSLGERATINCKSSQSLLYSRNQKNYLAWYQQKPGQ
PPKLLIFWASTRESGVPDRFSGSGFGTDFTLTISSLQAEDVAVYYCQQ
YFSYPLTFGQGTKVEIK

[0104] The FAP binding agent of the present invention may include CDR1, CDR2, or CDR3 of the VH or VL chain of F19. The VH chain of F19 includes the following CDRs:

CDR1:
(SEQ ID NO: 960)
RYTFTEYTIH
CDR2:
(SEQ ID NO: 961)
GINPNNGIPN
CDR3:
(SEQ ID NO: 962)
RRIAYGYDEGHAMDY

[0105] The VL chain of F19 includes the following CDRs:

CDR1:
(SEQ ID NO: 963)
KSSQSLLYSRNQKNYLA
CDR2:
(SEQ ID NO: 964)
WASTRES
CDR3:
(SEQ ID NO: 965)
QQYFSYPLT

[0106] In some embodiments, the FAP binding agent of the present invention is a FAP antibody (e.g., MFP5 mouse, MFP5 Humanized Variant 1, and MFP5 Humanized Variant 2) or a portion thereof (such as, VH chain, VL chain, CDR1, CDR2 or CDR3) from International Patent Publication No. WO 2007/077173 (which is hereby incorporated by reference in its entirety) wherein the amino acid sequence of VH chain, VL chain and their CDRs are as follows:

[0107] FAP Binding Agent MP5 (Mouse)

MFP5 VH (mouse):
(SEQ ID NO: 966)
QVQLQQSGAELARPGASVNLSCKASGYTFTNNGINWLKQRTGQGLEWIG
EIYPRSTNTLYNEKFKGKATLTADRSSNTAYMELRSLTSEDSAVYFCAR
TLTAPFAFWGQGTLVTVSA
MFP5 VL (mouse):
(SEQ ID NO: 967)
QIVLTQSPAIMSASPGEKVTMTCSASSGVNFMHWYQQKSGTSPKRWIFD
TSKLASGVPARFSGSGSGTSYSLTISSMEAEDAATYYCQQWSFNPPTFG
GGTKLEIKR

[0108] The FAP binding agent of the present invention may include CDR1, CDR2, or CDR3 of the VH or VL chain of MFP5 (Mouse). The VH chain of MFP5 includes the following CDRs:

CDR1:
(SEQ ID NO: 968)
GYTFTNNGIN
CDR2:
(SEQ ID NO: 969)
EIYPRSTNTL
CDR3:
(SEQ ID NO: 970)
TLTAPFAF

[0109] The VL chain of MFP5 includes the following CDRs:

CDR1:
(SEQ ID NO: 971)
SASSGVNFMH
CDR2:
(SEQ ID NO: 972)
DTSKLAS
CDR3:
(SEQ ID NO: 973)
QQWSFNPPT

[0110] FAP Binding Agent MP5 (Humanized Variant 1)

MFP5 (Humanized Variant 1) VH:
(SEQ ID NO: 974)
QVQLVQSGAEVKKPGASVKVSCKASGYTFTNNGINWLRQAPGQGLEWMG
EIYPRSTNTLYAQKFQGRVTITADRSSNTAYMELSSLRSEDTAVYFCAR
TLTAPFAFWGQGTLVTVSS
MFP5 (Humanized Variant 1) VL:
(SEQ ID NO: 975)
QIVLTQSPATLSLSPGERATLSCSASSGVNFMHWYQQKPGQAPRRLIFD
TSKLASGIPARFSGSGSGTDYTLTISSLEPEDFAVYYCQQWSFNPPTFG
QGTKVEIKR

[0111] The FAP binding agent of the present invention may include CDR1, CDR2, or CDR3 of the VH or VL chain of MFP5 (Humanized Variant 1). The VH chain of MFP5 (Humanized Variant 1) includes the following CDRs:

CDR1:
(SEQ ID NO: 976)
GYTFTNNGIN
CDR2:
(SEQ ID NO: 977)
EIYPRSTNTL
CDR3:
(SEQ ID NO: 978)
TLTAPFAF

[0112] The VL chain of MFP5 (Humanized Variant 1) includes the following CDRs:

CDR1:
(SEQ ID NO: 979)
SASSGVNFMH
CDR2:
(SEQ ID NO: 980)
DTSKLAS
CDR3:
(SEQ ID NO: 981)
QQWSFNPPT

[0113] FAP Binding Agent MP5 (Humanized Variant 2)

MFP5 (Humanized Variant 2) VH:
(SEQ ID NO: 982)
QVQLVQSGAEVKKPGASVKVSCKASGYTFTNNGINWLRQAPGQGLEWMG
EIYPRSTNTLYAQKFQGRVTITADRSSNTAYMELSSLRSEDTAVYFCAR
TLTAPFAFWGQGTLVTVSS
MFP5 (Humanized Variant 2) VL:
(SEQ ID NO: 983)
QIVLTQSPATLSLSPGERATLSCSASSGVNFMHWYQQKPGQAPKRLIFD
TSKLASGVPARFSGSGSGTDYTLTISSLEPEDFAVYYCQQWSFNPPTFG
QGTKVEIKR

[0114] The FAP binding agent of the present invention may include CDR1, CDR2, or CDR3 of the VH or VL chain of MFP5 (Humanized Variant 2). The VH chain of MFP5 (Humanized Variant 2) includes the following CDRs:

CDR1:
(SEQ ID NO: 984)
GYTFTNNGIN
CDR2:
(SEQ ID NO: 985)
EIYPRSTNTL
CDR3:
(SEQ ID NO: 986)
TLTAPFAF

[0115] The VL chain of MFP5 (Humanized Variant 2) includes the following CDRs:

CDR1:
(SEQ ID NO: 987)
SASSGVNFMH
CDR2:
(SEQ ID NO: 988)
DTSKLAS
CDR3:
(SEQ ID NO: 989)
QQWSFNPPT

[0116] In some embodiments, the FAP binding agent of the present invention is a FAP antibody (e.g., 4G8, 3F2, 28H1, 29B11, 14B3, and 4B9) or a portion thereof (such as, VH chain, VL chain, CDR1, CDR2 or CDR3) from International Patent Publication No. WO 2012/107417 (which is hereby incorporated by reference in its entirety) wherein the amino acid sequence of VH chain, VL chain and their CDRs are as follows:

[0117] FAP Binding Agent 4G8

4G8 VH:
(SEQ ID NO: 990)
EVQLLESGGGLVQPGGSLRLSCAASGFTFSSYAMSWRQAPGKGLEWSAI
SGSGGSTYYADSVKGRFTISRDNSKNTLYLQMNSLRAEDTAVYYCAKGW
LGNFDYWGQGTLVTVSS
4G8 VL:
(SEQ ID NO: 991)
EIVLTQSPGTLSLSPGERATLSCRASQSVSRSYLAWYQQKPGQAPRLLI
IGASTRATGIPDRFSGSGSGTDFTLTISRLEPEDFAVYYCQQGQVIPPT
FGQGTKVEIKR

[0118] The FAP binding agent of the present invention may include CDR1, CDR2, or CDR3 of the VH or VL chain of 4G8. The VH chain of 4G8 includes the following CDRs:

CDR1:
(SEQ ID NO: 992)
GFTFSSYAMS
CDR2:
(SEQ ID NO: 993)
AISGSGGSTY
CDR3:
(SEQ ID NO: 994)
GWLGNFDY

[0119] The VL chain of 4G8 includes the following CDRs:

CDR1:
(SEQ ID NO: 995)
RASQSVSRSYLA
CDR2:
(SEQ ID NO: 996)
GASTRAT
CDR3:
(SEQ ID NO: 997)
QQGQVIPPT

[0120] FAP Binding Agent 3F2

3F2 VH:
(SEQ ID NO: 998)
EVQLLESGGGLVQPGGSLRLSCAASGFTFSSYAMSWRQAPGKGLEWSAI
SGSGGSTYYADSVKGRFTISRDNSKNTLYLQMNSLRAEDTAVYYCAKGW
FGGFNYWGQGTLVTVSS
3F2 VL:
(SEQ ID NO: 999)
EIVLTQSPGTLSLSPGERATLSCRASQSVTSSYLAWYQQKPGQAPRLLI
NVGSRRATGIPDRFSGSGSGTDFTLTISRLEPEDFAVYYCQQGIMLPPT
FGQGTKVEIKR

[0121] The FAP binding agent of the present invention may include CDR1, CDR2, or CDR3 of the VH or VL chain of 3F2. The VH chain of 3F2 includes the following CDRs:

CDR1:
(SEQ ID NO: 1000)
GFTFSSYAMS
CDR2:
(SEQ ID NO: 1001)
AISGSGGSTY
CDR3:
(SEQ ID NO: 1002)
GWFGGFNY

[0122] The VL chain of 3F2 includes the following CDRs:

CDR1:
(SEQ ID NO: 1003)
RASQSVTSSYLA
CDR2:
(SEQ ID NO: 1004)
VGSRRAT
CDR3:
(SEQ ID NO: 1005)
QQGIMLPPT

[0123] FAP Binding Agent 28H1

28H1 VH:
(SEQ ID NO: 1006)
QVQLLESGGGLVQPGGSLRLSCAASGFTFSSHAMSWRQAPGKGLEWSAIW
ASGEQYYADSVKGRFTISRDNSKNTLYLQMNSLRAEDTAVYYCAKGWLGN
FDYWGQGTLVTVSS
28H1 VL:
(SEQ ID NO: 1007)
EIVLTQSPGTLSLSPGERATLSCRASQSVSRSYLAWYQQKPGQAPRLLII
GASTRATGIPDRFSGSGSGTDFTLTISRLEPEDFAVYYCQQGQVIPPTFG
QGTKVEIKR

[0124] The FAP binding agent of the present invention may include CDR1, CDR2, or CDR3 of the VH or VL chain of 28H1. The VH chain of 28H1 includes the following CDRs:

CDR1:
(SEQ ID NO: 1008)
GFTFSSHAMS
CDR2:
(SEQ ID NO: 1009)
AIWASGEQY
CDR3:
(SEQ ID NO: 1010)
GWLGNFDY

[0125] The VL chain of 28H1 includes the following CDRs:

CDR1:
(SEQ ID NO: 1011)
RASQSVSRSYLA
CDR2:
(SEQ ID NO: 1012)
GASTRAT
CDR3:
(SEQ ID NO: 1013)
QQGQVIPPT

[0126] FAP Binding Agent 29B11

29B11 VH:
(SEQ ID NO: 1014)
EVQLLESGGGLVQPGGSLRLSCAASGFTFSSYAMSWVRQAPGKGLEWSAIIG
SGGITYYADSVKGRFTISRDNSKNTLYLQMNSLRAEDTAVYYCAKGWFGGFN
YWGQGTLVTVSS
29B11 VL:
(SEQ ID NO: 1015)
EIVLTQSPGTLSLSPGERATLSCRASQSVTSSYLAWYQQKPGQAPRLLINVG
SRRATGIPDRFSGSGSGTDFTLTISRLEPEDFAVYYCQQGIMLPPTFGQGTK
VEIKR

[0127] The FAP binding agent of the present invention may include CDR1, CDR2, or CDR3 of the VH or VL chain of 29B11. The VH chain of 29B11 includes the following CDRs:

CDR1:
(SEQ ID NO: 1016)
GFTFSSYAMS
CDR2:
(SEQ ID NO: 1017)
AIIGSGGITY
CDR3:
(SEQ ID NO: 1018)
GWFGGFNY

[0128] The VL chain of 29B11 includes the following CDRs:

CDR1:
(SEQ ID NO: 1019)
RASQSVTSSYLA
CDR2:
(SEQ ID NO: 1020)
VGSRRAT
CDR3:
(SEQ ID NO: 1021)
QQGIMLPPT

[0129] FAP Binding Agent 14B3

14B3VH:
(SEQ ID NO: 1022)
EVQLLESGGGLVQPGGSLRLSCAASGFTFSSYAMSWVRQAPGKGLEWSA
ILASGAITYYADSVKGRFTISRDNSKNTLYLQMNSLRAEDTAVYYCAKG
WFGGFNYWGQGTLVTVSS
14B3VL:
(SEQ ID NO: 1023)
EIVLTQSPGTLSLSPGERATLSCRASQSVTSSYLAWYQQKPGQAPRLLI
NVGSRRATGIPDRFSGSGSGTDFTLTISRLEPEDFAVYYCQQGIMLPPT
FGQGTKVEIKR

[0130] The FAP binding agent of the present invention may include CDR1, CDR2, or CDR3 of the VH or VL chain of 14B3. The VH chain of 14B3 includes the following CDRs:

CDR1:
(SEQ ID NO: 1024)
GFTFSSYAMS
CDR2:
(SEQ ID NO: 1025)
AILASGAITY
CDR3:
(SEQ ID NO: 1026)
GWFGGFNY

[0131] The VL chain of 14B3 includes the following CDRs:

CDR1:
(SEQ ID NO: 1027)
RASQSVTSSYLA
CDR2:
(SEQ ID NO: 1028)
VGSRRAT
CDR3:
(SEQ ID NO: 1029)
QQGIMLPPT

[0132] FAP Binding Agent 4B9

4B9 VH:
(SEQ ID NO: 1030)
EVQLLESGGGLVQPGGSLRLSCAASGFTFSSYAMSWRQAPGKGLEWSAIIG
SGASTYYADSVKGRFTISRDNSKNTLYLQMNSLRAEDTAVYYCAKGWFGGF
NYWGQGTLVTVSS
4B9 VL:
(SEQ ID NO: 1031)
EIVLTQSPGTLSLSPGERATLSCRASQSVTSSYLAWYQQKPGQAPRLLINV
GSRRATGIPDRFSGSGSGTDFTLTISRLEPEDFAVYYCQQGIMLPPTFGQG
TKVEIKR

[0133] The FAP binding agent of the present invention may include CDR1, CDR2, or CDR3 of the VH or VL chain of 4B9. The VH chain of 4B9 includes the following CDRs:

CDR1:
(SEQ ID NO: 1032)
GFTFSSYAMS
CDR2:
(SEQ ID NO: 1033)
AIIGSGASTY
CDR3:
(SEQ ID NO: 1034)
GWFGGFNY

[0134] The VL chain of 4B9 includes the following CDRs:

CDR1:
(SEQ ID NO: 1035)
RASQSVTSSYLA
CDR2:
(SEQ ID NO: 1036)
VGSRRAT
CDR3:
(SEQ ID NO: 1037)
QQGIMLPPT.

[0135] Any one of the FAP binding agents, disclosed herein, can be an antibody. A FAP binding agent that is an antibody can be a part of any one of chimeric proteins or chimeric protein complexes disclosed herein. As used herein, the term “antibody” refers to any immunoglobulin or antibody (e.g., human, hamster, feline, mouse, cartilaginous fish, or camelid antibodies), and any derivative or conjugate thereof, that specifically binds to an antigen. A wide variety of antibodies are known by those skilled in the art. Non-limiting examples of antibodies include monoclonal antibodies, polyclonal antibodies, humanized antibodies, multi-specific antibodies (e.g., bi-specific antibodies), single-chain antibodies (e.g., single-domain antibodies, camelid antibodies, and cartilaginous fish antibodies), chimeric antibodies, feline antibodies, and felinized antibodies. Monoclonal antibodies are homogeneous populations of antibodies to a particular epitope of an antigen. Polyclonal antibodies are heterogeneous populations of antibody molecules that are contained in the sera of the immunized animals. The term “antibody” also includes antibody derivatives and conjugates (e.g., an antibody conjugated to a stabilizing protein, a detectable moiety, or a therapeutic agent).

[0136] Any one of the FAP binding agents, disclosed herein, can be an antigen binding fragment of an antibody. A FAP binding agent that is an antigen binding fragment of an antibody can be a part of any one of chimeric proteins or chimeric protein complexes disclosed herein. An “antigen binding fragment” is any portion of a full-length antibody that contains at least one variable domain (e.g., a variable domain of a mammalian (e.g., feline, human, hamster, or mouse) heavy or light chain immunoglobulin, a camelid variable antigen binding domain (VHH), or a cartilaginous fish immunoglobulin new antigen receptor (Ig-NAR) domain) that is capable of specifically binding to an antigen. Non-limiting examples of antibody fragments include Fab, Fab′, F(ab′)₂, and Fv fragments, diabodies, linear antibodies, and multi-specific antibodies formed from antibody fragments. Additional antibody fragments containing at least one camelid VHH domain or at least one cartilaginous fish Ig-NAR domain include mini-bodies, micro-antibodies, subnano-antibodies, and nano-antibodies, and any of the other forms of antibodies described, for example, in U.S. Publication No. 2010/0092470.

[0137] Any one of the FAP binding agents, disclosed herein, can be an Fv fragment of an antibody. A FAP binding agent that is an Fv fragment of an antibody can be a part of any one of chimeric proteins or chimeric protein complexes disclosed herein. An “Fv fragment” is the minimum antibody fragment that contains a complete antigen recognition and binding site. This region consists of a dimer of one heavy chain variable domain and one light chain variable domain in tight, non-covalent association. It is in this configuration that the three complementary determining regions (CDRs) of each variable domain interact to define an antigen binding site on the surface of the VH-VL dimer.

[0138] Any one of the FAP binding agents, disclosed herein, can be a complementary determining region (CDR) of an antibody. A FAP binding agent that is a CDR of an antibody can be a part of any one of chimeric proteins or chimeric protein complexes disclosed herein. The term CDR refers to a region within an immunoglobulin (a heavy or light chain immunoglobulin) that forms part of an antigen binding site in an antibody or antigen binding fragment thereof. As is known in the art, heavy chain and light chain immunoglobulins each contain three CDRs, referred to as CDR1, CDR2, and CDR3. In any antibody or antigen binding fragment, the three CDRs from the heavy chain immunoglobulin and the three CDRs from the light chain immunoglobulin together form an antigen binding site in the antibody or antigen binding fragment thereof. The Kabat Database is one system used in the art to number CDR sequences present in a light chain immunoglobulin or a heavy chain immunoglobulin.

[0139] Collectively, the six CDR's confer antigen binding specificity to the antibody. However, even a single variable domain (or half of an Fv comprising only three CDR's specific for an antigen) has the ability to recognize and bind the antigen, although usually at a lower affinity than the entire binding site. The “Fab fragment” also contains the constant domain of the light chain and the first constant domain (CH1) of the heavy chain. The “Fab fragment” differs from the “Fab′ fragment” by the addition of a few residues at the carboxy terminus of the heavy chain CH1 domain, including one or more cysteines from the antibody hinge region. The “F(ab′)2 fragment” originally is produced as a pair of “Fab′ fragments” which have hinge cysteines between them. Methods of preparing such antibody fragments, such as papain or pepsin digestion, are known to those skilled in the art. For example, F(ab′)2 fragments can be produced by pepsin digestion of an antibody molecule, and Fab fragments can be generated by reducing the disulfide bridges of F(ab′)2 fragments. In some cases, Fab expression libraries can be constructed. See, for example, Huse et al., Science, 246:1275, 1989. Once produced, antibodies or fragments thereof can be tested for recognition of a TNFRSF25 polypeptide using standard immunoassay methods such as ELISA techniques, radioimmunoassays, and Western blotting. See, Short Protocols in Molecular Biology, Chapter 11, Green Publishing Associates and John Wiley & Sons, Ed. Ausubel et al., 1992.

[0140] An antibody can be of the IgA-, IgD-, IgE, IgG- or IgM-type, including IgG- or IgM-types such as, without limitation, IgG1-, IgG2-, IgG3-, IgG4-, IgM1- and IgM2-types. For example, in some cases, the antibody is of the IgG1-, IgG2- or IgG4- type.

[0141] In some embodiments, antibodies as provided herein can be fully human or humanized antibodies. By “human antibody” is meant an antibody that is encoded by a nucleic acid (e.g., a rearranged human immunoglobulin heavy or light chain locus) present in the genome of a human. In some embodiments, a human antibody can be produced in a human cell culture (e.g., feline hybridoma cells). In some embodiments, a human antibody can be produced in a non-human cell (e.g., a mouse or hamster cell line). In some embodiments, a human antibody can be produced in a bacterial or yeast cell.

[0142] Human antibodies can avoid certain problems associated with xenogeneic antibodies, such as antibodies that possess murine or rat variable and/or constant regions. For example, because the effector portion is human, it can interact better with other parts of the human immune system, e.g., to destroy target cells more efficiently by complement-dependent cytotoxicity or antibody-dependent cellular cytotoxicity. In addition, the human immune system should not recognize the antibody as foreign. Further, half-life in human circulation will be similar to naturally occurring human antibodies, allowing smaller and less frequent doses to be given. Methods for preparing human antibodies are known in the art.

[0143] As used herein, the term “humanized antibody” refers to a human antibody that contains minimal sequence derived from non-human (e.g., mouse, hamster, rat, rabbit, or goat) immunoglobulin. Humanized antibodies generally are chimeric or mutant monoclonal antibodies from mouse, rat, hamster, rabbit or other species, bearing human constant and/or variable region domains or specific changes. In non-limiting examples, humanized antibodies are human antibodies (recipient antibody) in which hypervariable region (HVR) residues of the recipient antibody are replaced by HVR residues from a non-human species (donor) antibody, such as a mouse, rat, rabbit, or goat antibody having the desired specificity, affinity, and capacity. In some embodiments, Fv framework residues of the human immunoglobulin can be replaced by corresponding non-human residues. In some embodiments, humanized antibodies can contain residues that are not found in the recipient antibody or in the donor antibody. Such modifications can be made to refine antibody performance, for example.

[0144] In some embodiments, a humanized antibody can contain substantially all of at least one, and typically two, variable domains, in which all or substantially all of the hypervariable loops (CDRs) correspond to those of a non-human immunoglobulin, while all or substantially all of the framework regions are those of a human immunoglobulin sequence. A humanized antibody also can contain at least a portion of an immunoglobulin constant (Fc) region, typically that of a human immunoglobulin.

[0145] In some embodiments, a humanized antibody or antigen binding fragment as provided herein can have reduced or minimal effector function (e.g., as compared to corresponding, non-humanized antibody), such that it does not stimulate effector cell action to the same extent that a corresponding non-humanized antibody would.

[0146] Techniques for generating humanized antibodies are well known to those of skill in the art. In some embodiments, controlled rearrangement of antibody domains joined through protein disulfide bonds to form new, artificial protein molecules or “chimeric” antibodies can be utilized (Konieczny et al., Haematologia (Budap.) 14:95, 1981). Recombinant DNA technology can be used to construct gene fusions between DNA sequences encoding mouse antibody variable light and heavy chain domains and human antibody light and heavy chain constant domains (Morrison et al., Proc Natl Acad Sci USA 81:6851, 1984). For example, DNA sequences encoding antigen binding portions or CDRs of murine monoclonal antibodies can be grafted by molecular means into DNA sequences encoding frameworks of human antibody heavy and light chains (Jones et al., Nature 321:522, 1986; and Riechmann et al., Nature 332:323, 1988). Expressed recombinant products are called “reshaped” or humanized antibodies, and contain the framework of a human antibody light or heavy chain and antigen recognition portions, CDRs, of a murine monoclonal antibody.

[0147] Other methods for designing heavy and light chains and for producing humanized antibodies are described in, for example, U.S. Pat. Nos. 5,530,101; 5,565,332; 5,585,089; 5,639,641; 5,693,761; 5,693,762; and 5,733,743. Yet additional methods for humanizing antibodies are described in U.S. Pat. Nos. 4,816,567; 4,935,496; 5,502,167; 5,558,864; 5,693,493; 5,698,417; 5,705,154; 5,750,078; and 5,770,403, for example.

[0148] Antibodies disclosed herein can be produced using standard methods. For example, they can be recombinantly produced, purified from a biological sample (e.g., a heterologous expression system), or chemically synthesized, and used to immunize host animals, including rabbits, chickens, mice, guinea pigs, or rats. Various adjuvants that can be used to increase the immunological response depend on the host species and include Freund's adjuvant (complete and incomplete), mineral gels such as aluminum hydroxide, surface active substances such as lysolecithin, pluronic polyols, polyanions, peptides, oil emulsions, keyhole limpet hemocyanin and dinitrophenol. Monoclonal antibodies can be prepared using, e.g., FAP and standard hybridoma technology. In particular, monoclonal antibodies can be obtained by any technique that provides for the production of antibody molecules by continuous cell lines in culture such as described by Kohler et al. (Nature 256:495, 1975), the human B-cell hybridoma technique of Kosbor et al. (Immunology Today, 4:72, 1983) or Cote et al. (Proc. Natl. Acad. Sci. USA, 80:2026, 1983), and the EBV-hybridoma technique described by Cole et al. (Monoclonal Antibodies and Cancer Therapy, Alan R. Liss, Inc., pp. 77-96, 1983). Such antibodies can be of any immunoglobulin class including IgG, IgM, IgE, IgA, IgD, and any subclass thereof. The hybridoma producing the monoclonal antibodies can be cultivated in vitro and in vivo.

[0149] In some embodiments, an antibody as provided herein has a heavy chain variable region containing any one of the VH amino acid sequences disclosed herein. In other embodiments, an antibody as provided herein has a heavy chain variable region containing any one of the VH amino acid sequences disclosed herein with one to 24 modifications (e.g., substitutions, additions, or deletions) such that the amino acid sequence has, e.g., one, two, three, four, five, six, seven, eight, nine, ten, eleven, twelve, thirteen, fourteen, fifteen, sixteen, seventeen, eighteen, nineteen, twenty, twenty-one, twenty-two, twenty-three, or twenty-four modification(s). In some embodiments, an antibody as provided herein has a light chain variable region containing any one of the VL amino acid sequences disclosed herein. In other embodiments, an antibody as provided herein has a light chain variable region containing any one of the VL amino acid sequences disclosed herein with one to 24 modifications (e.g., substitutions, additions, or deletions) such that the amino acid sequence has, e.g., one, two, three, four, five, six, seven, eight, nine, ten, eleven, twelve, thirteen, fourteen, fifteen, sixteen, seventeen, eighteen, nineteen, twenty, twenty-one, twenty-two, twenty-three, or twenty-four modification(s). This document also provides antibodies and antigen binding fragments that contain both a heavy chain variable region polypeptide and a light chain variable region polypeptide as disclosed herein. The antibodies or antigen binding fragments, as disclosed herein, also can include variable region heavy chain framework (FW) sequences juxtaposed between the CDRs, according to the formula (FW1)-(CDR1)-(FW2)-(CDR2)-(FW3)-(CDR3)-(FW4), for example. In some embodiments, the FW sequences can be human sequences.

[0150] In some embodiments, for example, the FAP binding agent has up to five modifications (substitutions, deletions, or insertions) in any one of the amino acid sequences for an antibody's CDR disclosed herein. For example, the FAP binding agent includes up to five substitutions, deletions, or insertions in any one of amino acid sequences of CDR1, CDR2, or CDR3 of an antibody disclosed herein.

[0151] In some embodiments, amino acid substitutions to the antibodies or FAP binding agents disclosed herein can be made by selecting conservative substitutions that do not differ significantly in their effect on maintaining (a) the structure of the peptide backbone in the area of the substitution, (b) the charge or hydrophobicity of the molecule at the target site, or (c) the bulk of the side chain. For example, naturally occurring residues can be divided into groups based on side-chain properties: (1) hydrophobic amino acids (norleucine, methionine, alanine, valine, leucine, and isoleucine); (2) neutral hydrophilic amino acids (cysteine, serine, and threonine); (3) acidic amino acids (aspartic acid and glutamic acid); (4) basic amino acids (asparagine, glutamine, histidine, lysine, and arginine); (5) amino acids that influence chain orientation (glycine and proline); and (6) aromatic amino acids (tryptophan, tyrosine, and phenylalanine). Substitutions made within these groups can be considered conservative substitutions. Non-limiting examples of conservative substitutions include, without limitation, substitution of valine for alanine, lysine for arginine, glutamine for asparagine, glutamic acid for aspartic acid, serine for cysteine, asparagine for glutamine, aspartic acid for glutamic acid, proline for glycine, arginine for histidine, leucine for isoleucine, isoleucine for leucine, arginine for lysine, leucine for methionine, leucine for phenylalanine, glycine for proline, threonine for serine, serine for threonine, tyrosine for tryptophan, phenylalanine for tyrosine, and/or leucine for valine. In some embodiments, an amino acid substitution can be non-conservative, such that a member of one of the amino acid classes described above is exchanged for a member of another class. In some embodiments, the FAP binding agent has at least 90% identity with any amino acid sequence selected from SEQ ID NOS: 2-42, 46-86, 837-850, 1045-1085, or 1086-1092 or of any one of the FAP binding agents disclosed herein. In some embodiments, the FAP binding agent has about 90%, about 91%, about 92%, about 93%, about 94%, about 95%, about 96%, about 97%, about 98%, about 99% identity with any amino acid selected from SEQ ID NOS: 2-42, 46-86, 837-850, 1045-1085, or 1086-1092 or of any one of the FAP binding agents disclosed herein.

[0152] In an embodiment, for example, the FAP binding agent has up to five substitutions, deletions, or insertions in any amino acid sequence selected from SEQ ID NOS: 87-175 or 851-879 or any CDR of a FAP binding agent disclosed herein. For example, the FAP binding agent includes up to five substitutions, deletions, or insertions in any amino acid sequence selected of CDR1, e.g., from SEQ ID NOS: 87-115, 851-861, 1093-1129, 882, 915, 920, 923, 928, 931, 936, 939, 944, 947, 952, 955, 960, 963, 968, 971, 976, 979, 984, 987, 992, 995, 1000, 1003, 1008, 1011, 1016, 1019, 1024, 1027, 1032, or 1035 (e.g., one, two, three, four or five total amino acid substitutions, deletions or insertions). Similarly, in another embodiment, the FAP binding agent includes up to five substitutions, deletions, or insertions in any amino acid sequence selected of CDR2, e.g., from SEQ ID NOS: 116-144, 862-876, 883, 916, 921, 924, 929, 932, 937, 940, 945, 948, 953, 956, 961, 964, 969, 972, 977, 980, 985, 988, 993, 996, 1001, 1004, 1009, 1012, 1017, 1020, 1025, 1028, 1033, or 1036 (e.g., one, two, three, four or five total amino acid substitutions, deletions or insertions). Similarly, in another embodiment, the FAP binding agent includes up to five substitutions, deletions, or insertions in any amino acid sequence selected of CDR3, e.g., from SEQ ID NOS: 145-175, 877-879, 884, 917, 922, 925, 930, 933, 938, 941, 946, 949, 954, 957, 962, 965, 970, 973, 978, 981, 986, 989, 994, 997, 1002, 1005, 1010, 1013, 1018, 1021, 1026, 1029, 1034, 1037 (e.g., one, two, three, four or five total amino acid substitutions, deletions or insertions). An amino acid substitution refers to the replacement of one or more amino acid residues with another residue(s) in a peptide sequence. An amino acid deletion refers to removal of one or more amino acid residues from a peptide sequence. An amino acid insertion refers to addition of one or more amino acid residues into a peptide sequence.

[0153] In various illustrative embodiments, the murine FAP binding agent has at least 90% identity with the amino acid sequence of sibrotuzumab.

[0154] In some embodiments, the present technology contemplates the use of any natural or synthetic analogs, mutants, variants, alleles, homologs and orthologs (herein collectively referred to as “analogs”) of the FAP binding agent of the present technology as described herein. In some embodiments, the amino acid sequence of the FAP binding agent further includes an amino acid analog, an amino acid derivative, or other non-classical amino acids.

[0155] In some embodiments, the FAP binding agent comprises a targeting moiety comprising a sequence that is at least 60% identical to any one of the FAP sequences disclosed herein. For example, the FAP binding agent may comprise a targeting moiety comprising a sequence that is at least about 60%, at least about 61%, at least about 62%, at least about 63%, at least about 64%, at least about 65%, at least about 66%, at least about 67%, at least about 68%, at least about 69%, at least about 70%, at least about 71%, at least about 72%, at least about 73%, at least about 74%, at least about 75%, at least about 76%, at least about 77%, at least about 78%, at least about 79%, at least about 80%, at least about 81%, at least about 82%, at least about 83%, at least about 84%, at least about 85%, at least about 86%, at least about 87%, at least about 88%, at least about 89%, at least about 90%, at least about 91%, at least about 92%, at least about 93%, at least about 94%, at least about 95%, at least about 96%, at least about 97%, at least about 98%, at least about 99%, or 100% identical to any of the FAP sequences disclosed herein (e.g. about 60%, or about 61%, or about 62%, or about 63%, or about 64%, or about 65%, or about 66%, or about 67%, or about 68%, or about 69%, or about 70%, or about 71%, or about 72%, or about 73%, or about 74%, or about 75%, or about 76%, or about 77%, or about 78%, or about 79%, or about 80%, or about 81%, or about 82%, or about 83%, or about 84%, or about 85%, or about 86%, or about 87%, or about 88%, or about 89%, or about 90%, or about 91%, or about 92%, or about 93%, or about 94%, or about 95%, or about 96%, or about 97%, or about 98%, about 99% or about 100% sequence identity to any one of the sequences disclosed herein).

[0156] In some embodiments, the FAP binding agent comprises a targeting moiety comprising an amino acid sequence having one or more amino acid mutations with respect to any one of the sequences disclosed herein. In some embodiments, the FAP binding agent comprises a targeting moiety comprising an amino acid sequence having one, or two, or three, or four, or five, or six, or seen, or eight, or nine, or ten, or fifteen, or twenty amino acid mutations with respect to any one of the sequences disclosed herein.

[0157] In some embodiments, the one or more amino acid mutations may be independently selected from substitutions, insertions, deletions, and truncations.

[0158] In some embodiments, the amino acid mutations are amino acid substitutions, and may include conservative and/or non-conservative substitutions.

[0159] “Conservative substitutions” may be made, for instance, on the basis of similarity in polarity, charge, size, solubility, hydrophobicity, hydrophilicity, and/or the amphipathic nature of the amino acid residues involved. The 20 naturally occurring amino acids can be grouped into the following six standard amino acid groups: (1) hydrophobic: Met, Ala, Val, Leu, Ile; (2) neutral hydrophilic: Cys, Ser, Thr; Asn, Gln; (3) acidic: Asp, Glu; (4) basic: His, Lys, Arg; (5) residues that influence chain orientation: Gly, Pro; and (6) aromatic: Trp, Tyr, Phe.

[0160] As used herein, “conservative substitutions” are defined as exchanges of an amino acid by another amino acid listed within the same group of the six standard amino acid groups shown above. For example, the exchange of Asp by Glu retains one negative charge in the so modified polypeptide. In addition, glycine and proline may be substituted for one another based on their ability to disrupt a-helices.

[0161] As used herein, “non-conservative substitutions” are defined as exchanges of an amino acid by another amino acid listed in a different group of the six standard amino acid groups (1) to (6) shown above.

[0162] In some embodiments, the substitutions include non-classical amino acids. Illustrative non-classical amino acids include, but are not limited to, selenocysteine, pyrrolysine, N-formylmethionine β-alanine, GABA and δ-Aminolevulinic acid, 4-aminobenzoic acid (PABA), D-isomers of the common amino acids, 2,4-diaminobutyric acid, α-amino isobutyric acid, 4-aminobutyric acid, Abu, 2-amino butyric acid, γ-Abu, ε-Ahx, 6-amino hexanoic acid, Aib, 2-amino isobutyric acid, 3-amino propionic acid, ornithine, norleucine, norvaline, hydroxyproline, sarcosme, citrulline, homocitrulline, cysteic acid, t-butylglycine, t-butylalanine, phenylglycine, cyclohexylalanine, β-alanine, fluoro-amino acids, designer amino acids such as β methyl amino acids, C α-methyl amino acids, N α-methyl amino acids, and amino acid analogs in general.

[0163] In some embodiments, one or more amino acid mutations are in the CDRs of the targeting moiety (e.g., the CDR1, CDR2 or CDR3 regions). In another embodiment, one or more amino acid mutations are in the framework regions (FRs) of the targeting moiety (e.g., the FR1, FR2, FR3, or FR4 regions).

[0164] Modification of the amino acid sequences may be achieved using any known technique in the art e.g., site-directed mutagenesis or PCR based mutagenesis. Such techniques are described, for example, in Sambrook et al., Molecular Cloning: A Laboratory Manual, Cold Spring Harbor Press, Plainview, N.Y., 1989 and Ausubel et al., Current Protocols in Molecular Biology, John Wiley & Sons, New York, N.Y., 1989.

[0165] In some embodiments, the mutations do not substantially reduce the present FAP binding agent's capability to specifically bind to

[0166] FAP. In some embodiments, the mutations do not substantially reduce the present FAP binding agent's capability to specifically bind to FAP and without functionally modulating (e.g., partially or fully neutralizing) FAP.

[0167] In some embodiments, the binding affinity of the FAP binding agent of the present technology for the full-length and/or mature forms and/or isoforms and/or splice variants and/or fragments and/or monomeric and/or dimeric forms and/or any other naturally occurring or synthetic analogs, variants, or mutants (including monomeric and/or dimeric forms) of human FAP may be described by the equilibrium dissociation constant (K_{D}). In some embodiments, the FAP binding agent comprises a targeting moiety that binds to the full-length and/or mature forms and/or isoforms and/or splice variants and/or fragments and/or any other naturally occurring or synthetic analogs, variants, or mutants (including monomeric and/or dimeric forms) of human FAP with a K_{D} of less than about 1 μM, about 900 nM, about 800 nM, about 700 nM, about 600 nM, about 500 nM, about 400 nM, about 300 nM, about 200 nM, about 100 nM, about 90 nM, about 80 nM, about 70 nM, about 60 nM, about 50 nM, about 40 nM, about 30 nM, about 20 nM, about 10 nM, or about 5 nM, or about 1 nM.

[0168] In some embodiments, the FAP binding agent comprises a targeting moiety that binds but does not functionally modulate (e.g., partially or fully neutralize) the antigen of interest, i.e., FAP. For instance, in some embodiments, the targeting moiety of the FAP binding agent simply targets the antigen but does not substantially functionally modulate (e.g. partially or fully inhibit, reduce or neutralize) a biological effect that the antigen has. In some embodiments, the targeting moiety of the FAP binding agent binds an epitope that is physically separate from an antigen site that is important for its biological activity (e.g. an antigen's active site).

[0169] Such binding without significant function modulation finds use in some embodiments of the present technology, including methods in which the present FAP binding agent is used to directly or indirectly recruit active immune cells to a site of need via an effector antigen. For example, in some embodiments, the present FAP binding agent may be used to directly or indirectly recruit dendritic cells via FAP to a tumor cell in a method of reducing or eliminating a tumor (e.g. the FAP binding agent may comprise a targeting moiety having an anti-FAP antigen recognition domain and a targeting moiety having a recognition domain (e.g. antigen recognition domain) directed against a tumor antigen or receptor). In such embodiments, it is desirable to directly or indirectly recruit dendritic cells but not to functionally modulate or neutralize the FAP activity. In these embodiments, FAP signaling is an important piece of the tumor reducing or eliminating effect.

[0170] In some embodiments, the FAP binding agent enhances antigen-presentation by dendritic cells. For example, in some embodiments, the present FAP binding agent directly or indirectly recruits dendritic cells via FAP to a tumor cell, where tumor antigens are subsequently endocytosed and presented on the dendritic cell for induction of potent humoral and cytotoxic T cell responses.

[0171] In other embodiments (for example, related to treating cancer, autoimmune, or neurodegenerative disease), the FAP binding agent comprises a targeting moiety that binds and neutralizes the antigen of interest, i.e., FAP. For instance, in some embodiments, the present methods may inhibit or reduce FAP signaling or expression, e.g. to cause a reduction in an immune response.

[0172] Chimeras and Fusions with Signaling Agents

[0173] In some embodiments, the FAP binding agent of the present technology, as disclosed herein, is part of a chimera or fusion protein or Fc-based chimeric protein complex with one or more signaling agents. Accordingly, the present technology provides for chimeric or fusion proteins or Fc-based chimeric protein complex that include, for example, a targeting moiety against FAP and one or more signaling agents. In some embodiments, the signaling agent is a wildtype signaling agent or a modified signaling agent.

[0174] In various embodiments, the chimera or fusion protein or Fc-based chimeric protein complex includes a wild type signaling agent that has improved target selectivity and safety relative to i) a signaling agent which is not fused to an Fc; or ii) a signaling agent which is not in the context of a complex, e.g., without limitation, a heterodimeric complex. In various embodiments, the chimera or fusion protein or Fc-based chimeric protein complex comprises a wild type signaling agent that has improved target selective activity relative to i) a signaling agent which is not fused to an Fc, or ii) a signaling agent which is not in the context of a complex, e.g., without limitation, a heterodimeric complex. In various embodiments, the Fc-based chimeric protein complex allows for conditional activity.

[0175] In various embodiments, the chimera or fusion protein or Fc-based chimeric protein complex comprises a wild type signaling agent that has improved safety, e.g. reduced systemic toxicity, reduced side effects, and reduced off-target effects relative to a signaling agent which is not fused to an Fc, or a signaling agent which is not in the context of a complex, e.g., without limitation, a heterodimeric complex. In various embodiments, improved safety means that the present chimera or fusion protein or Fc-based chimeric protein provides lower toxicity (e.g. systemic toxicity and/or tissue/organ-associated toxicities); and/or lessened or substantially eliminated side effects; and/or increased tolerability, lessened or substantially eliminated adverse events; and/or reduced or substantially eliminated off-target effects; and/or an increased therapeutic window of the wild type signaling agent as compared to the signaling agent which is not fused to an Fc, or a signaling agent which is not in the context of a complex, e.g., without limitation, a heterodimeric complex.

[0176] In some embodiments, the reduced affinity or activity at the receptor is restorable by attachment with one or more of the targeting moieties as described herein or upon inclusion in the Fc-based chimeric protein complex as disclosed herein.

[0177] In various embodiments, the chimera or fusion protein or Fc-based chimeric protein complex comprises a wild type signaling agent that has reduced, substantially reduced, or ablated affinity, e.g. binding (e.g. KD) and/or activation (for instance, when the modified signaling agent is an agonist of its receptor, measurable as, for example, KA and/or EC5o) and/or inhibition (for instance, when the modified signaling agent is an antagonist of its receptor, measurable as, for example, Ki and/or 1050), for one or more of its receptors. In various embodiments, the reduced affinity at the signaling agent's receptor allows for attenuation of activity. In such embodiments, the modified signaling agent has about 1%, or about 3%, about 5%, about 10%, about 15%, about 20%, about 25%, about 30%, about 35%, about 40%, about 45%, about 50%, about 60%, about 65%, about 70%, about 75%, about 80%, about 85%, about 90%, about 95%, or about 10%-20%, about 20%-40%, about 50%, about 40%-60%, about 60%-80%, about 80%-100% of the affinity for the receptor as compared to the signaling agent which is not fused to an Fc, or a signaling agent which is not in the context of a complex, e.g., without limitation, a heterodimeric complex. In some embodiments, the binding affinity is at least about 2-fold lower, about 3-fold lower, about 4-fold lower, about 5-fold lower, about 6-fold lower, about 7-fold lower, about 8-fold lower, about 9-fold lower, at least about 10-fold lower, at least about 15-fold lower, at least about 20-fold lower, at least about 25-fold lower, at least about 30-fold lower, at least about 35-fold lower, at least about 40-fold lower, at least about 45-fold lower, at least about 50-fold lower, at least about 100-fold lower, at least about 150-fold lower, or about 10-50-fold lower, about 50-100-fold lower, about 100-150-fold lower, about 150-200-fold lower, or more than 200-fold lower as compared to the signaling agent which is not fused to an Fc, or a signaling agent which is not in the context of a complex, e.g., without limitation, a heterodimeric complex.

[0178] In various embodiments, the chimera or fusion protein or Fc-based chimeric protein complex comprises a wild type signaling agent that has reduced endogenous activity of the signaling agent to about 75%, or about 70%, or about 60%, or about 50%, or about 40%, or about 30%, or about 25%, or about 20%, or about 10%, or about 5%, or about 3%, or about 1%, e.g., as compared to the signaling agent which is not fused to an Fc, or a signaling agent which is not in the context of a complex, e.g., without limitation, a heterodimeric complex.

[0179] In some embodiments, the signaling agent is modified to have reduced affinity or activity for one or more of its receptors, which allows for attenuation of activity (inclusive of agonism or antagonism) and/or prevents non-specific signaling or undesirable sequestration of the chimeric or fusion protein or Fc-based chimeric protein complex. In some embodiments, the signaling agent is antagonistic in its wild type form and bears one or more mutations that attenuate its antagonistic activity. In some embodiments, the signaling agent is antagonistic due to one or more mutations, e.g. an agonistic signaling agent is converted to an antagonistic signaling agent and, such a converted signaling agent, optionally, also bears one or more mutations that attenuate its antagonistic activity (e.g. as described in WO 2015/007520, the entire contents of which are hereby incorporated by reference).

[0180] Accordingly, in some embodiments, the signaling agent is a modified (e.g. mutant) form of the signaling agent having one or more modifications (e.g. mutations). In some embodiments, the mutations allow for the modified signaling agent to have one or more of attenuated activity such as one or more of reduced binding affinity, reduced endogenous activity, and reduced specific bioactivity relative to unmutated, i.e., the wild type form of the signaling agent (e.g. comparing the same signaling agent in a wild type form versus a modified (e.g. mutant) form). In some embodiments, the mutations which attenuate or reduce binding or affinity include those mutations which substantially reduce or ablate binding or activity. In some embodiments, the mutations which attenuate or reduce binding or affinity are different than those mutations which substantially reduce or ablate binding or activity. Consequentially, in some embodiments, the mutations allow for the signaling agent to have improved safety, e.g. reduced systemic toxicity, reduced side effects, and reduced off-target effects relative to unmutated, i.e., wild type, signaling agent (e.g. comparing the same signaling agent in a wild type form versus a modified (e.g. mutant) form).

[0181] As described herein, the agent may have improved safety due to one of more modifications, e.g. mutations. In some embodiments, improved safety means that the present chimeric protein or Fc-based chimeric protein complex provides lower toxicity (e.g. systemic toxicity and/or tissue/organ-associated toxicities); and/or lessened or substantially eliminated side effects; and/or increased tolerability, lessened or substantially eliminated adverse events; and/or reduced or substantially eliminated off-target effects; and/or an increased therapeutic window.

[0182] In some embodiments, the signaling agent is modified to have one or more mutations that reduce its binding affinity or activity for one or more of its receptors. In some embodiments, the signaling agent is modified to have one or more mutations that substantially reduce or ablate binding affinity or activity for the receptors. In some embodiments, the activity provided by the wild type signaling agent is agonism at the receptor (e.g. activation of a cellular effect at a site of therapy). For example, the wild type signaling agent may activate its receptor. In such embodiments, the mutations result in the modified signaling agent to have reduced or ablated activating activity at the receptor. For example, the mutations may result in the modified signaling agent to deliver a reduced activating signal to a target cell or the activating signal could be ablated. In some embodiments, the activity provided by the wild type signaling agent is antagonism at the receptor (e.g. blocking or dampening of a cellular effect at a site of therapy). For example, the wild type signaling agent may antagonize or inhibit the receptor. In these embodiments, the mutations result in the modified signaling agent to have a reduced or ablated antagonizing activity at the receptor. For example, the mutations may result in the modified signaling agent to deliver a reduced inhibitory signal to a target cell or the inhibitory signal could be ablated. In some embodiments, the signaling agent is antagonistic due to one or more mutations, e.g. an agonistic signaling agent is converted to an antagonistic signaling agent (e.g. as described in WO 2015/007520, the entire contents of which are hereby incorporated by reference) and, such a converted signaling agent, optionally, also bears one or mutations that reduce its binding affinity or activity for one or more of its receptors or that substantially reduce or ablate binding affinity or activity for one or more of its receptors.

[0183] In some embodiments, the reduced affinity or activity at the receptor is restorable by attachment with one or more of the targeting moieties as described herein (e.g., targeting moiety against FAP) or upon inclusion in the Fc-based chimeric protein complex as disclosed herein. In other embodiments, the reduced affinity or activity at the receptor is not substantially restorable by the activity of one or more of the targeting moieties or upon inclusion in the Fc-based chimeric protein complex as disclosed herein.

[0184] In some embodiments, the chimeric proteins or Fc-based chimeric protein complex of the present technology reduce off-target effects because their signaling agents have mutations that weaken or ablate binding affinity or activity at a receptor. In some embodiments, this reduction in side effects is observed relative with, for example, the wild type signaling agents. In some embodiments, the signaling agent is active on target cells because the targeting moiety(ies) compensates for the missing/insufficient binding (e.g., without limitation and/or avidity) required for substantial activation. In some embodiments, the modified signaling agent is substantially inactive enroute to the site of therapeutic activity and has its effect substantially on specifically targeted cell types which greatly reduces undesired side effects.

[0185] In some embodiments, the signaling agent may include one or more mutations that attenuate or reduce binding or affinity for one receptor (i.e., a therapeutic receptor) and one or more mutations that substantially reduce or ablate binding or activity at a second receptor. In such embodiments, these mutations may be at the same or at different positions (i.e., the same mutation or multiple mutations). In some embodiments, the mutation(s) that reduce binding and/or activity at one receptor is different than the mutation(s) that substantially reduce or ablate at another receptor. In some embodiments, the mutation(s) that reduce binding and/or activity at one receptor is the same as the mutation(s) that substantially reduce or ablate at another receptor. In some embodiments, the present chimeric proteins or Fc-based chimeric protein complex have a modified signaling agent that has both mutations that attenuate binding and/or activity at a therapeutic receptor and therefore allow for a more controlled, on-target therapeutic effect (e.g. relative wild type signaling agent) and mutations that substantially reduce or ablate binding and/or activity at another receptor and therefore reduce side effects (e.g. relative to wild type signaling agent).

[0186] In some embodiments, the substantial reduction or ablation of binding or activity is not substantially restorable with a targeting moiety (e.g., a targeting moiety against FAP or any other targeting moiety described herein) or upon inclusion in the Fc-based chimeric protein complex as disclosed herein. In some embodiments, the substantial reduction or ablation of binding or activity is restorable with a targeting moiety or upon inclusion in the Fc-based chimeric protein complex as disclosed herein. In some embodiments, substantially reducing or ablating binding or activity at a second receptor also may prevent deleterious effects that are mediated by the other receptor. Alternatively, or in addition, substantially reducing or ablating binding or activity at the other receptor causes the therapeutic effect to improve as there is a reduced or eliminated sequestration of the therapeutic chimeric proteins away from the site of therapeutic action. For instance, in some embodiments, this obviates the need of high doses of the present chimeric proteins or Fc-based chimeric protein complex that compensate for loss at the other receptor. Such ability to reduce dose further provides a lower likelihood of side effects.

[0187] In some embodiments, the modified signaling agent comprises one or more mutations that cause the signaling agent to have reduced, substantially reduced, or ablated affinity, e.g. binding (e.g. KD) and/or activation (for instance, when the modified signaling agent is an agonist of its receptor, measurable as, for example, KA and/or EC50) and/or inhibition (for instance, when the modified signaling agent is an antagonist of its receptor, measurable as, for example, Ki and/or 1050), for one or more of its receptors. In some embodiments, the reduced affinity at the immunomodulating agent's receptor allows for attenuation of activity (inclusive of agonism or antagonism). In such embodiments, the modified signaling agent has about 1%, or about 3%, about 5%, about 10%, about 15%, about 20%, about 25%, about 30%, about 35%, about 40%, about 45%, about 50%, about 60%, about 65%, about 70%, about 75%, about 80%, about 85%, about 90%, about 95%, or about 10%-20%, about 20%-40%, about 50%, about 40%-60%, about 60%-80%, about 80%-100% of the affinity for the receptor relative to the wild type signaling agent. In some embodiments, the binding affinity is at least about 2-fold lower, about 3-fold lower, about 4-fold lower, about 5-fold lower, about 6-fold lower, about 7-fold lower, about 8-fold lower, about 9-fold lower, at least about 10-fold lower, at least about 15-fold lower, at least about 20-fold lower, at least about 25-fold lower, at least about 30-fold lower, at least about 35-fold lower, at least about 40-fold lower, at least about 45-fold lower, at least about 50-fold lower, at least about 100-fold lower, at least about 150-fold lower, or about 10-50-fold lower, about 50-100-fold lower, about 100-150-fold lower, about 150-200-fold lower, or more than 200-fold lower relative to the wild type signaling agent.

[0188] In embodiments wherein the modified signaling agent has mutations that reduce binding at one receptor and substantially reduce or ablate binding at a second receptor, the attenuation or reduction in binding affinity of a modified signaling agent for one receptor is less than the substantial reduction or ablation in affinity for the other receptor. In some embodiments, the attenuation or reduction in binding affinity of a modified signaling agent for one receptor is less than the substantial reduction or ablation in affinity for the other receptor by about 1%, or about 3%, about 5%, about 10%, about 15%, about 20%, about 25%, about 30%, about 35%, about 40%, about 45%, about 50%, about 60%, about 65%, about 70%, about 75%, about 80%, about 85%, about 90%, or about 95%. In some embodiments, substantial reduction or ablation refers to a greater reduction in binding affinity and/or activity than attenuation or reduction.

[0189] In some embodiments, the modified signaling agent comprises one or more mutations that reduce the endogenous activity of the signaling agent to about 75%, or about 70%, or about 60%, or about 50%, or about 40%, or about 30%, or about 25%, or about 20%, or about 10%, or about 5%, or about 3%, or about 1%, e.g., relative to the wild type signaling agent.

[0190] In some embodiments, the modified signaling agent comprises one or more mutations that cause the signaling agent to have reduced affinity for its receptor that is lower than the binding affinity of the targeting moiety(ies) for its(their) receptor(s). In some embodiments, this binding affinity differential is between signaling agent/receptor and targeting moiety/receptor on the same cell. In some embodiments, this binding affinity differential allows for the signaling agent, e.g. mutated signaling agent, to have localized, on-target effects and to minimize off-target effects that underlie side effects that are observed with wild type signaling agent. In some embodiments, this binding affinity is at least about 2-fold, or at least about 5-fold, or at least about 10-fold, or at least about 15-fold lower, or at least about 25-fold, or at least about 50-fold lower, or at least about 100-fold, or at least about 150-fold.

[0191] Receptor binding activity may be measured using methods known in the art. For example, affinity and/or binding activity may be assessed by Scatchard plot analysis and computer-fitting of binding data (e.g. Scatchard, 1949) or by reflectometric interference spectroscopy under flow through conditions, as described by Brecht et al. (1993), the entire contents of all of which are hereby incorporated by reference.

[0192] In various embodiments, the additional signaling agent is selected from wildtype or modified versions of cytokines, growth factors, monokines, traditional polypeptide hormones, such as human growth hormone, N-methionyl human growth hormone, and bovine growth hormone; parathyroid hormone; thyroxine; insulin; proinsulin; relaxin; prorelaxin; glycoprotein hormones such as follicle stimulating hormone (FSH), thyroid stimulating hormone (TSH), and luteinizing hormone (LH); hepatic growth factor; fibroblast growth factor; prolactin; placental lactogen; tumor necrosis factor-a and tumor necrosis factor-β; mullerian-inhibiting substance; mouse gonadotropin-associated peptide; inhibin; activin; vascular endothelial growth factor; integrin; thrombopoietin (TPO); nerve growth factors such as NGF-α; platelet-growth factor; transforming growth factors (TGFs) such as TGF-α and TGF-β; insulin-like growth factor-I and -II; osteo inductive factors; interferons such as, for example, interferon-α, interferon-β and interferon-γ (and interferon type I, II, and III), colony stimulating factors (CSFs) such as macrophage-CSF (M-CSF); granulocyte-macrophage-CSF (GM-CSF); and granulocyte-CSF (G-CSF); interleukins (ILs) such as, for example, IL-113, IL-1a, IL-2, IL-3, IL-4, IL-5, IL-6, IL-7, IL-8, IL-9, IL-10, IL-11, IL-12, IL-13, and IL-18; a tumor necrosis factor such as, for example, TNF-α or TNF-β; and other polypeptide factors including, for example, LIF and kit ligand (KL). As used herein, cytokines, growth factors, and hormones include proteins obtained from natural sources or produced from recombinant bacterial, eukaryotic or mammalian cell culture systems and biologically active equivalents of the native sequence cytokines.

[0193] In some embodiments, the additional signaling agent is a wildtype or modified version of a growth factor selected from, but not limited to, transforming growth factors (TGFs) such as TGF-α and TGF-β, epidermal growth factor (EGF), insulin-like growth factor such as insulin-like growth factor-I and -II, fibroblast growth factor (FGF), heregulin, platelet-derived growth factor (PDGF), vascular endothelial growth factor (VEGF).

[0194] In an embodiment, the growth factor is a wildtype or modified version of a fibroblast growth factor (FGF). Illustrative FGFs include, but are not limited to, FGF1, FGF2, FGF3, FGF4, FGF5, FGF6, FGF7, FGF8, FGF9, FGF10, FGF11, FGF12, FGF13, FGF14, murine FGF15, FGF16, FGF17, FGF18, FGF19, FGF20, FGF21, FGF22, and FGF23.

[0195] In an embodiment, the growth factor is a wildtype or modified version of a transforming growth factor (TGF). Illustrative TGFs include, but are not limited to, TGF-α and TGF-β and subtypes thereof including the various subtypes of TGF-β including TGFβ1, TGFβ2, and TGFβ3.

[0196] In some embodiments, the additional signaling agent is a wildtype or modified version of a hormone selected from, but not limited to, human chorionic gonadotropin, gonadotropin releasing hormone, an androgen, an estrogen, thyroid-stimulating hormone, follicle-stimulating hormone, luteinizing hormone, prolactin, growth hormone, adrenocorticotropic hormone, antidiuretic hormone, oxytocin, thyrotropin-releasing hormone, growth hormone releasing hormone, corticotropin-releasing hormone, somatostatin, dopamine, melatonin, thyroxine, calcitonin, parathyroid hormone, glucocorticoids, mineralocorticoids, adrenaline, noradrenaline, progesterone, insulin, glucagon, amylin, calcitriol, calciferol, atrial-natriuretic peptide, gastrin, secretin, cholecystokinin, neuropeptide Y, ghrelin, PYY3-36, insulin-like growth factor (IGF), leptin, thrombopoietin, erythropoietin (EPO), and angiotensinogen.

[0197] In some embodiments, the signaling agent is an immune-modulating agent, e.g. one or more of an interleukin, interferon, and tumor necrosis factor.

[0198] In some embodiments, the signaling agent is a wildtype interleukin or a modified interleukin, including for example IL-1; IL-113, IL-2; IL-3; IL-4; IL-5; IL-6; IL-7; IL-8; IL-9; IL-10; IL-11; IL-12; IL-13; IL-14; IL-15; IL-16; IL-17; IL-18; IL-19; IL-20; IL-21; IL-22; IL-23; IL-24; IL-25; IL-26; IL-27; IL-28; IL-29; IL-30; IL-31; IL-32; IL-33; IL-35; IL-36 or a fragment, variant, analogue, or family-member thereof. Interleukins are a group of multi- functional cytokines synthesized by lymphocytes, monocytes, and macrophages. Known functions include stimulating proliferation of immune cells (e.g., T helper cells, B cells, eosinophils, and lymphocytes), chemotaxis of neutrophils and T lymphocytes, and/or inhibition of interferons. Interleukin activity can be determined using assays known in the art: Matthews et al., in Lymphokines and Interferons: A Practical Approach, Clemens et al., eds, IRL Press, Washington, D.C. 1987, pp. 221-225; and Orencole & Dinarello (1989) Cytokine 1, 14-20.

[0199] In some embodiments, the signaling agent is a wildtype interferon or a modified version of an interferon such as interferon types I, II, and III. Illustrative interferons, including for example, interferon-a-1, 2, 4, 5, 6, 7, 8, 10, 13, 14, 16, 17, and 21, interferon-β and interferon-γ, interferon κ, interferon ε, interferon τ, interferon δ, IFN-v, and interferon ω̅.

[0200] In some embodiments, the signaling agent is a wildtype tumor necrosis factor (TNF) or a modified version of a tumor necrosis factor (TNF) or a protein in the TNF family, including but not limited to, TNF-α, TNF-β, LT-β, CD40L, CD27L, CD30L, FASL, 4-1BBL, OX40L, and TRAIL.

[0201] The amino acid sequences of the wild type signaling agents described herein are well known in the art. Accordingly, in some embodiments the modified signaling agent comprises an amino acid sequence that has at least about 60%, or at least about 61%, or at least about 62%, or at least about 63%, or at least about 64%, or at least about 65%, or at least about 66%, or at least about 67%, or at least about 68%, or at least about 69%, or at least about 70%, or at least about 71%, or at least about 72%, or at least about 73%, or at least about 74% or at least about 75% or at least about 76%, or at least about 77%, or at least about 78%, or at least about 79%, or at least about 80%, or at least about 81%, or at least about 82%, or at least about 83% at least about 84%, or at least at least about 85%, or at least about 86%, or at least about 87%, or at least about 88%, or at least about 89%, or at least about 90%, or at least about 91% or at least about 92%, or at least about 93%, or at least about 94%, or at least about 95%, or at least about 96%, or at least about 97%, or at least about 98%, or at least about 99% sequence identity with the known wild type amino acid sequences of the signaling agents described herein (e.g. about 60%, or about 61%, or about 62%, or about 63%, or about 64%, or about 65%, or about 66%, or about 67%, or about 68%, or about 69%, or about 70%, or about 71%, or about 72%, or about 73%, or about 74%, or about 75%, or about 76%, or about 77%, or about 78%, or about 79%, or about 80%, or about 81%, or about 82%, or about 83%, or about 84%, or about 85%, or about 86%, or about 87%, or about 88%, or about 89%, or about 90%, or about 91%, or about 92%, or about 93%, or about 94%, or about 95%, or about 96%, or about 97%, or about 98%, or about 99% sequence identity).

[0202] In some embodiments the modified signaling agent comprises an amino acid sequence that has at least about 60%, or at least about 61%, 65%, or at least about 66%, 70%, or at least about 71%, 75%, or at least about 76%, 80%, or at least about 81%, 85%, or at least about 86%, 90%, or at least about 91%, or at least about 62%, or at least about 67%, or at least about 72%, or at least about 77%, or at least about 82%, or at least about 87%, or at least about 92% or at least about 63%, or at least about 68%, or at least about 73%, or at least about 78%, or at least about 83%, or at least about 88%, or at least about 93% or at least about 64%, or at least about 69%, or at least about 74%, or at least about 79%, or at least about 84%, or at least about 89%, or at least about 94% or at least about or at least about or at least about or at least about or at least about or at least about or at least about 95%, or at least about 96%, or at least about 97%, or at least about 98%, or at least about 99% sequence identity with any amino acid sequences of the signaling agents described herein (e.g. about 60%, or about 61%, or about 62%, or about 63%, or about 64%, or about 65%, or about 66%, or about 67%, or about 68%, or about 69%, or about 70%, or about 71%, or about 72%, or about 73%, or about 74%, or about 75%, or about 76%, or about 77%, or about 78%, or about 79%, or about 80%, or about 81%, or about 82%, or about 83%, or about 84%, or about 85%, or about 86%, or about 87%, or about 88%, or about 89%, or about 90%, or about 91%, or about 92%, or about 93%, or about 94%, or about 95%, or about 96%, or about 97%, or about 98%, or about 99% sequence identity).

[0203] In some embodiments, the modified signaling agent comprises an amino acid sequence having one or more amino acid mutations. In some embodiments, the one or more amino acid mutations may be independently selected from substitutions, insertions, deletions, and truncations. In some embodiments, the amino acid mutations are amino acid substitutions, and may include conservative and/or non-conservative substitutions, as described elsewhere herein. In some embodiments, the substitutions may also include non-classical amino acids as described elsewhere herein.

[0204] As described herein, the modified signaling agents bear mutations that affect affinity and/or activity at one or more receptors. In some embodiments, there is reduced affinity and/or activity at a therapeutic receptor, e.g. a receptor through which a desired therapeutic effect is mediated (e.g. agonism or antagonism). In some embodiments, the modified signaling agents bear mutations that substantially reduce or ablate affinity and/or activity at a receptor, e.g. a receptor through which a desired therapeutic effect is not mediated (e.g. as the result of promiscuity of binding). The receptors of any modified signaling agents, e.g. one of the cytokines, growth factors, and hormones as described herein, are known in the art.

[0205] Illustrative mutations which provide reduced affinity and/or activity (e.g. agonistic) at a receptor are found in WO 2013/107791 and PCT/EP2017/061544 (e.g. with regard to interferons), WO 2015/007542 (e.g. with regard to interleukins), and WO 2015/007903 (e.g. with regard to TN F), the entire contents of each of which are hereby incorporated by reference. Illustrative mutations which provide reduced affinity and/or activity (e.g. antagonistic) at a therapeutic receptor are found in WO 2015/007520, the entire contents of which are hereby incorporated by reference.

[0206] In some embodiments, the modified signaling agent comprises one or more mutations that cause the signaling agent to have reduced affinity and/or activity for a type I cytokine receptor, a type II cytokine receptor, a chemokine receptor, a receptor in the Tumor Necrosis Factor Receptor (TNFR) superfamily, TGF-beta Receptors, a receptor in the immunoglobulin (Ig) superfamily, and/or a receptor in the tyrosine kinase superfamily.

[0207] In some embodiments, the receptor for the signaling agent is a Type I cytokine receptor. Type I cytokine receptors are known in the art and include, but are not limited to receptors for IL2 (beta-subunit), IL3, IL4, IL5, IL6, IL7, IL9, ID 1, IL12, GM-CSF, G-CSF, LIF, CNTF, and also the receptors for Thrombopoietin (TP0), Prolactin, and Growth hormone. Illustrative type I cytokine receptors include, but are not limited to, GM-CSF receptor, G-CSF receptor, LIF receptor, CNTF receptor, TPO receptor, and type I IL receptors.

[0208] In some embodiments, the receptor for the signaling agent is a Type II cytokine receptor. Type II cytokine receptors are multimeric receptors composed of heterologous subunits, and are receptors mainly for interferons. This family of receptors includes, but is not limited to, receptors for interferon-a, interferon-13 and interferon-y, IL10, IL22, and tissue factor. Illustrative type II cytokine receptors include, but are not limited to, IFN-αreceptor (e.g. IFNAR1 and IFNAR2), IFN-3 receptor, IFN-γ receptor (e.g. IFNGR1 and IFNGR2), and type II IL receptors.

[0209] In some embodiments, the receptor for the signaling agent is a G protein-coupled receptor. Chemokine receptors are G protein-coupled receptors with seven transmembrane structure and coupled to G-protein for signal transduction. Chemokine receptors include, but are not limited to, CC chemokine receptors, CXC chemokine receptors, CX3C chemokine receptors, and XC chemokine receptor (XCR1). Illustrative chemokine receptors include, but are not limited to, CCR1, CCR2, CCR3, CCR4, CCRS, CCR6, CCR7, CCR8, CCR9, CCR10, CXCR1, CXCR2, CXCR3, CXCR3B, CXCR4, CXCRS, CSCR6, CXCR7, XCR1, and CX3CR1.

[0210] In some embodiments, the receptor for the signaling agent is a TNFR family member. Tumor necrosis factor receptor (TNFR) family members share a cysteine-rich domain (CRD) formed of three disulfide bonds surrounding a core motif of CXXCXXC creating an elongated molecule. Illustrative tumor necrosis factor receptor family members include: CDI 20a (TNFRSFIA), CD 120b (TNFRSFIB), Lymphotoxin beta receptor (LTBR, TNFRSF3), CD 134 (TNFRSF4), CD40 (CD40, TNFRSFS), FAS (FAS, TNFRSF6), TNFRSF6B (TNFRSF6B), CD27 (CD27, TNFRSF7), CD30 (TNFRSF8), CD137 (TNFRSF9), TNFRSFIOA (TNFRSFIOA), TNFRSFIOB, (TNFRSFIOB), TNFRSFIOC (TNFRSFIOC), TNFRSFIOD (TNFRSFIOD), RANK (TNFRSFI IA), Osteoprotegerin (TNFRSFI IB), TNFRSF12A (TNFRSF12A), TNFRSF13B (TNFRSF13B), TNFRSF13C (TNFRSF13C), TNFRSF14 (TNFRSF14), Nerve growth factor receptor (NGFR, TNFRSF16), TNFRSF17 (TNFRSF17), TNFRSF18 (TNFRSF18), TNFRSF19 (TNFRSF19), TNFRSF21 (TNFRSF21), and TNFRSF25 (TNFRSF25). In an embodiment, the TNFR family member is CD120a (TNFRSF1A) or TNF-R1. In another embodiment, the TNFR family member is CD 120b (TNFRSFIB) or TNF-R2.

[0211] In some embodiments, the receptor for the signaling agent is a TGF-beta receptor. TGF-beta receptors are single pass serine/threonine kinase receptors. TGF-beta receptors include, but are not limited to, TGFBR1, TGFBR2, and TGFBR3.

[0212] In some embodiments, the receptor for the signaling agent is an Ig superfamily receptor. Receptors in the immunoglobulin (Ig) superfamily share structural homology with immunoglobulins. Receptors in the Ig superfamily include, but are not limited to, interleukin-1 receptors, CSF-1R, PDGFR (e.g. PDGFRA and PDGFRB), and SCFR.

[0213] In some embodiments, the receptor for the signaling agent is a tyrosine kinase superfamily receptor. Receptors in the tyrosine kinase superfamily are well known in the art. There are about 58 known receptor tyrosine kinases (RTKs), grouped into 20 subfamilies. Receptors in the tyrosine kinase superfamily include, but are not limited to, FGF receptors and their various isoforms such as FGFR1, FGFR2, FGFR3, FGFR4, and FGFR5.

[0214] In some embodiments, the wildtype or modified signaling agent is interferon a. In some embodiments, the modified IFN-α agent has reduced affinity and/or activity for the IFN-α/β receptor (IFNAR), i.e., IFNAR1 and/or IFNAR2 chains. In some embodiments, the modified IFN-α agent has substantially reduced or ablated affinity and/or activity for the IFN-α/β receptor (IFNAR), i.e., I FNAR1 and/or IFNAR2 chains. In some embodiments, the modified IFN-α agent is a human modified IFN-α agent.

[0215] Mutant forms of interferon are known to the person skilled in the art. By way of example, but not by way of limitation, in some embodiments, the modified signaling agent is the allelic form IFN-α2a having the amino acid sequence of: SEQ ID NO: 176.

[0216] By way of example, but not by way of limitation, in some embodiments, the modified signaling agent is the allelic form IFN-α2b having the amino acid sequence of: SEQ ID NO: 177; which differs from IFN-α2a at amino acid position 23.

[0217] In some embodiments, a modified IFN-α2 signaling agent is a human IFN-α2 mutant (IFN-α2a or IFN-α2b). In some embodiments, the human IFN-α2 mutant (IFN-α2a or IFN-α2b) is mutated at one or more amino acids at positions 144-154, e.g., such as amino acid positions 148, 149 and/or 153. In some embodiments, the human IFN-α2 mutant comprises one or more mutations selected from L153A, R149A, and M148A.

[0218] In some embodiments, the IFN-α2 mutants have reduced affinity and/or activity for IFNAR1. In some embodiments, the IFN-α2 mutant is a human IFN-α2 mutant comprising one or more mutations selected from F64A, N65A, T69A, L80A, Y85A, and Y89A, as described in W02010/030671, the entire contents of which is hereby incorporated by reference.

[0219] In some embodiments, the IFN-α2 mutant is a human IFN-α2 mutant comprising one or more mutations selected from K133A, R144A, R149A, and L153A, as described in W02008/124086, the entire contents of which is hereby incorporated by reference.

[0220] In some embodiments, the IFN-α2 mutant is a human IFN-α2 mutant comprising one or more mutations selected from R120E and R120E/K121E, as described in WO2015/007520 and WO2010/030671, the entire contents of which are hereby incorporated by reference.

[0221] In some embodiments, the IFN-α2 mutant antagonizes wild type IFN-α2 activity. In some embodiments, said mutant IFN-α2 has reduced affinity and/or activity for IFNAR1, while affinity and/or activity of IFNR2 is retained.

[0222] In some embodiments, a human IFN-α2 mutant comprises (1) one or more mutations selected from R120E and R120E/K121E, which, without wishing to be bound by theory, create an antagonistic effect and (2) one or more mutations selected from K133A, R144A, R149A, and L153A, which, without wishing to be bound by theory, allow for an attenuated effect at, for example, I FNAR2. In some embodiments, the human IFN-α2 mutant comprises R120E and L153A.

[0223] In some embodiments, the human IFN-α2 mutant comprises one or more mutations selected from L15A, A19W, R22A, R23A, L26A, F27A, L30A, L30V, K31A, D32A, R33K, R33A, R33Q, H34A, D35A, Q40A, D114R, L117A, R120A, R125A, K134A, R144A, A145G, A145M, M148A, R149A, S152A, L153A, and N156A as disclosed in WO 2013/059885, the entire disclosures of which are hereby incorporated by reference. In some embodiments, the human IFN-α2 mutant comprises the mutations H57Y, E58N, Q61S, and/or L30A as disclosed in WO 2013/059885. In some embodiments, the human IFN-α2 mutant comprises the mutations H57Y, E58N, Q61S, and/or R33A as disclosed in WO 2013/059885. In some embodiments, the human IFN-α2 mutant comprises the mutations H57Y, E58N, Q61S, and/or M148A as disclosed in WO 2013/059885. In some embodiments, the human IFN-α2 mutant comprises the mutations H57Y, E58N, Q61S, and/or L153A as disclosed in WO 2013/059885. In some embodiments, the human IFN-α2 mutant comprises the mutations N65A, L80A, Y85A, and/or Y89A as disclosed in WO 2013/059885. In some embodiments, the human IFN-α2 mutant comprises the mutations N65A, L80A, Y85A, Y89A, and/or D114A as disclosed in WO 2013/059885. In some embodiments, the human IFN-α2 mutant comprises the mutations R144X₁, A145X₂, and R33A, wherein X₁ is selected from A, S, T, Y, L, and I, and wherein X₂ is selected from G, H, Y, K, and D. In some embodiments, the mutant human IFNα2 has one or more mutations selected from R33A, T106X₃, R120E, R144X₁ A145X₂, M148A, R149A, and L153A with respect to amino acid sequence of SEQ ID NO: 176 or 177, wherein X₁ is selected from A, S, T, Y, L, and I, wherein X₂ is selected from G, H, Y, K, and D, and wherein X₃ is selected from A and E.

[0224] In some embodiments, the signaling agent is a wild type interferon α1 or a modified interferon α1. In some embodiments, the present invention provides a chimeric protein or Fc-based chimeric protein complex that includes a wild type IFNα1. In various embodiments, the wild-type IFNα1 comprises the following amino acid sequence:

(SEQ ID NO: 1042)
CDLPETHSLDNRRTLMLLAQMSRISPSSCLMDRHDFGFPQEEFDGNQFQKA
PAISVLHELIQQIFNLFTTKDSSAAWDEDLLDKFCTELYQQLNDLEACVMQ
EERVGETPLMNADSILAVKKYFRRITLYLTEKKYSPCAWEVVRAEIMRSLS
LSTNLQERLRRKE.

[0225] In various embodiments, the chimeric protein or Fc-based chimeric protein complex of the invention comprises a modified version of IFNα1, i.e., a IFNα1 variant including a IFNα1 mutant, as a signaling agent. In various embodiments, the IFNα1 variant encompasses mutants, functional derivatives, analogs, precursors, isoforms, splice variants, or fragments of the interferon. In some embodiments, the IFNα1 interferon is modified to have a mutation at one or more amino acids at positions L15, A19, R23, S25, L30, D32, R33, H34, Q40, C86, D115, L118, K121, R126, E133, K134, K135, R145, A146, M149, R150, S153, L154, and N157 with reference to SEQ ID NO: 1042. The mutations can optionally be a hydrophobic mutation and can be, e.g., selected from alanine, valine, leucine, and isoleucine. In some embodiments, the IFNα1 interferon is modified to have a one or more mutations selected from L15A, A19W, R23A, S25A, L30A, L30V, D32A, R33K, R33A, R33Q, H34A, Q40A, C86S, C86A, D115R, L118A, K121A, K121E, R126A, R126E, E133A, K134A, K135A, R145A, R145D, R145E, R145G, R145H, R145I, R145K, R145L, R145N, R145Q, R145S, R145T, R145V, R145Y, A146D, A146E, A146G, A146H, A146I, A146K, A146L, A146M, A146N, A146Q, A146R, A146S, A146T, A146V, A146Y, M149A, M149V, R150A, S153A, L154A, and N157A with reference to SEQ ID NO: 1042. In some embodiments, the IFNα1 mutant comprises one or more multiple mutations selected from L30A/H58Y/E59N_Q62S, R33A/H58Y/E59N/Q62S, M149A/H58Y/E59N/Q62S, L154A/H58Y/E59N/Q62S, R145A/H58Y/E59N/Q62S, D115A/R121A, L118A/R121A, L118A/R121A/K122A, R121A/K122A, and R121E/K122E with reference to SEQ ID NO: 1042).

[0226] In some embodiments, the IFN-α1 is a variant that comprises one or more mutations which reduce undesired disulphide pairings wherein the one or more mutations are, e.g., at amino acid positions C1, C29, C86, C99, or C139 with reference to SEQ ID NO: 1042. In some embodiments, the mutation at position C86 can be, e.g., C86S or C86A or C86Y. These C86 mutants of IFN-α1 are called reduced cysteine-based aggregation mutants. In some embodiment, the IFNα1 variant includes mutations at positions C1, C86 and C99 with reference to SEQ ID NO: 1042.

[0227] In an embodiment, the wildtype or modified signaling agent is interferon β. In such embodiments, the modified interferon β agent has reduced affinity and/or activity for the IFN-α/β receptor (IFNAR), i.e., IFNAR1 and/or IFNAR2 chains. In some embodiments, the modified interferon β agent has substantially reduced or ablated affinity and/or activity for the IFN-α/β receptor (IFNAR), i.e., IFNAR1 and/or IFNAR2 chains.

[0228] In an illustrative embodiment, the modified signaling agent is IFN-β. In some embodiments, the IFN-β encompasses functional derivatives, analogs, precursors, isoforms, splice variants, or fragments of IFN-β. In some embodiments, the IFN-β encompasses IFN-β derived from any species. In an embodiment, the chimeric protein or Fc-based chimeric protein complex comprises a modified version of mouse IFN-β. In another embodiment, the chimeric protein or Fc-based chimeric protein complex comprises a modified version of human IFN-β. Human IFN-β is a polypeptide with a molecular weight of about 22 kDa comprising 166 amino acid residues. The amino acid sequence of human IFN-β is shown as SEQ ID NO: 178.

[0229] In some embodiments, the human IFN-β is IFN-β-Ia, which is a glycosylated form of human IFN-β. In some embodiments, the human IFN-β is IFN-β-Ib, which is a non-glycosylated form of human IFN-β that has a Met-1 deletion and a Cys-17 to Ser mutation.

[0230] In some embodiments, the modified IFN-β has one or more mutations that reduce its binding to or its affinity for the IFNAR1 subunit of IFNAR. In some embodiments, the modified IFN-β has reduced affinity and/or activity at IFNAR1.

[0231] In some embodiments, the modified IFN-β with reduced affinity and/or activity at IFNAR1 is human IFN-β and has one or more mutations at positions F67, R71, L88, Y92, 195, N96, K123, and R124. In some embodiments, the one or more mutations are substitutions selected from F67G, F67S, R71A, L88G, L88S, Y92G, Y92S, 195A, N96G, K123G, and R124G. In some embodiments, the modified human IFN-β comprises the F67G mutation. In some embodiments, the modified human IFN-β comprises the K123G mutation. In some embodiments, the modified human IFN-β comprises the F67G and R71A mutations. In some embodiments, the modified human IFN-β comprises the L88G and Y92G mutations. In some embodiments, the modified human IFN-β comprises the Y92G, 195A, and N96G mutations. In some embodiments, the modified human IFN-β comprises the K123G and R124G mutations. In some embodiments, the modified human IFN-β comprises the F67G, L88G, and Y92G mutations. In some embodiments, the modified human IFN-β comprises the F67S, L88S, and Y92S mutations.

[0232] In some embodiments, the modified IFN-β has one or more mutations that reduce its binding to or its affinity for the IFNAR2 subunit of IFNAR. In some embodiments, the modified IFN-β has reduced affinity and/or activity at IFNAR2.

[0233] In some embodiments, the modified IFN-β reduced affinity and/or activity at IFNAR2 is human IFN-β and has one or more mutations at positions W22, R27, L32, R35, V148, L151, R152, and Y155. In some embodiments, the one or more mutations are substitutions selected from W22G, R27G, L32A, L32G, R35A, R35G, V148G, L151G, R152A, R152G, and Y155G. In some embodiments, the modified human IFN-β comprises the W22G mutation. In some embodiments, the modified human IFN-β comprises the L32A mutation. In some embodiments, the modified human IFN-β comprises the L32G mutation. In some embodiments, the modified human IFN-β comprises the R35A mutation. In some embodiments, the modified human IFN-β comprises the R35G mutation. In some embodiments, the modified human IFN-β comprises the V148G mutation. In some embodiments, the modified human IFN-β comprises the R152A mutation. In some embodiments, the modified human IFN-β comprises the R152G mutation. In some embodiments, the modified human IFN-β comprises the Y155G mutation. In some embodiments, the modified human IFN-β comprises the W22G and R27G mutations. In some embodiments, the modified human IFN-β comprises the L32A and R35A mutation. In some embodiments, the modified human IFN-β comprises the L151G and R152A mutations. In some embodiments, the modified human IFN-β comprises the V148G and R152A mutations.

[0234] In some embodiments, the modified IFN-β has one or more of the following mutations: R35A, R35T, E42K, M621, G78S, A141Y, A142T, E149K, and R152H. In some embodiments, the modified IFN-β has one or more of the following mutations: R35A, R35T, E42K, M621, G78S, A141Y, A142T, E149K, and R152H in combination with C175 or MA.

[0235] In some embodiments, the modified IFN-β has one or more of the following mutations: R35A, R35T, E42K, M621, G78S, A141Y A142T, E149K, and R152H in combination with any of the other IFN-β mutations described herein.

[0236] The crystal structure of human IFN-β is known and is described in Karpusas et al., (1998) PNAS, 94(22): 11813⁻'11818. Specifically, the structure of human IFN-β has been shown to include five a-helices (i.e., A, B, C, D, and E) and four loop regions that connect these helices (i.e., AB, BC, CD, and DE loops). In some embodiments, the modified IFN-β has one or more mutations in the A, B, C, D, E helices and/or the AB, BC, CD, and DE loops, which reduce its binding affinity or activity at a therapeutic receptor such as IFNAR. Illustrative mutations are described in WO 2000/023114 and US 20150011732, the entire contents of which are hereby incorporated by reference.

[0237] In an illustrative embodiment, the modified IFN-β is human IFN-β comprising alanine substitutions at amino acid positions 15, 16, 18, 19, 22, and/or 23. In an illustrative embodiment, the modified IFN-β is human IFN-β comprising alanine substitutions at amino acid positions 28-30, 32, and 33. In an illustrative embodiment, the modified IFN-β is human IFN-β comprising alanine substitutions at amino acid positions 36, 37, 39, and 42. In an illustrative embodiment, the modified IFN-β is human IFN-β comprising alanine substitutions at amino acid positions 64 and 67 and a serine substitution at position 68. In an illustrative embodiment, the modified IFN-β is human IFN-β comprising alanine substitutions at amino acid positions 71-73. In an illustrative embodiment, the modified IFN-β is human IFN-β comprising alanine substitutions at amino acid positions 92, 96, 99, and 100. In an illustrative embodiment, the modified I FN-β is human I FN-β comprising alanine substitutions at amino acid positions 128, 130, 131, and 134. In an illustrative embodiment, the modified IFN-β is human IFN-β comprising alanine substitutions at amino acid positions 149, 153, 156, and 159. In some embodiments, the mutant IFN-β comprises SEQ ID NO: 178 and a mutation at W22, the mutation being an aliphatic hydrophobic residue selected from glycine (G), alanine (A), leucine (L), isoleucine (I), methionine (M), and valine (V).

[0238] In some embodiments, the mutant IFN-β comprises SEQ ID NO: 178 and a mutation at R27, wherein the mutations is an aliphatic hydrophobic residue selected from glycine (G), alanine (A), leucine (L), isoleucine (I), methionine (M), and valine (V).

[0239] In some embodiments, the mutant IFN-β comprises SEQ ID NO: 178 and a mutation at W22, wherein the mutations is an aliphatic hydrophobic residue selected from glycine (G), alanine (A), leucine (L), isoleucine (I), methionine (M), and valine (V) and a mutation at R27, the mutation being an aliphatic hydrophobic residue selected from glycine (G), alanine (A), leucine (L), isoleucine (I), methionine (M), and valine (V).

[0240] In some embodiments, the mutant IFN-β comprises SEQ ID NO: 178 and a mutation at L32, the mutation being an aliphatic hydrophobic residue selected from glycine (G), alanine (A), isoleucine (I), methionine (M), and valine (V).

[0241] In some embodiments, the mutant IFN-β comprises SEQ ID NO: 178 and a mutation at R35, the mutation being an aliphatic hydrophobic residue selected from glycine (G), alanine (A), leucine (L), isoleucine (I), methionine (M), and valine (V).

[0242] In some embodiments, the mutant IFN-β comprises SEQ ID NO: 178 and a mutation at L32, the mutation being an aliphatic hydrophobic residue selected from glycine (G), alanine (A), isoleucine (I), methionine (M), and valine (V) and a mutation at R35, the mutation being an aliphatic hydrophobic residue selected from glycine (G), alanine (A), leucine (L), isoleucine (I), methionine (M), and valine (V).

[0243] In some embodiments, the mutant IFN-β comprises SEQ ID NO: 178 and a mutation at F67, the mutation being an aliphatic hydrophobic residue selected from glycine (G), alanine (A), leucine (L), isoleucine (I), methionine (M), and valine (V).

[0244] In some embodiments, the mutant IFN-β comprises SEQ ID NO: 178 and a mutation at R71, the mutation being an aliphatic hydrophobic residue selected from glycine (G), alanine (A), leucine (L), isoleucine (I), methionine (M), and valine (V).

[0245] In some embodiments, the mutant IFN-β comprises SEQ ID NO: 178 and a mutation at F67, the mutation being an aliphatic hydrophobic residue selected from glycine (G), alanine (A), leucine (L), isoleucine (I), methionine (M), and valine (V) and a mutation at R71, the mutation being an aliphatic hydrophobic residue selected from glycine (G), alanine (A), leucine (L), isoleucine (I), methionine (M), and valine (V).

[0246] In some embodiments, the mutant IFN-β comprises SEQ ID NO: 178 and a mutation at L88, the mutation being an aliphatic hydrophobic residue selected from glycine (G), alanine (A), isoleucine (I), methionine (M), and valine (V).

[0247] In some embodiments, the mutant IFN-β comprises SEQ ID NO: 178 and a mutation at Y92, the mutation being an aliphatic hydrophobic residue selected from glycine (G), alanine (A), leucine (L), isoleucine (I), methionine (M), and valine (V).

[0248] In some embodiments, the mutant IFN-β comprises SEQ ID NO: 178 and a mutation at F67, the mutation being an aliphatic hydrophobic residue selected from glycine (G), alanine (A), leucine (L), isoleucine (I), methionine (M), and valine (V) and a mutation at L88, the mutation being an aliphatic hydrophobic residue selected from glycine (G), alanine (A), isoleucine (I), methionine (M), and valine (V) and a mutation at Y92, the mutation being an aliphatic hydrophobic residue selected from glycine (G), alanine (A), leucine (L), isoleucine (I), methionine (M), and valine (V).

[0249] In some embodiments, the mutant IFN-β comprises SEQ ID NO: 178 and a mutation at L88, the mutation being an aliphatic hydrophobic residue selected from glycine (G), alanine (A), isoleucine (I), methionine (M), and valine (V) and a mutation at Y92, the mutation being an aliphatic hydrophobic residue selected from glycine (G), alanine (A), leucine (L), isoleucine (I), methionine (M), and valine (V).

[0250] In some embodiments, the mutant IFN-β comprises SEQ ID NO: 178 and a mutation at 195, the mutation being an aliphatic hydrophobic residue selected from glycine (G), alanine (A), leucine (L), methionine (M), and valine (V) and a mutation at Y92, the mutation being an aliphatic hydrophobic residue selected from glycine (G), alanine (A), leucine (L), isoleucine (1), methionine (M), and valine (V).

[0251] In some embodiments, the mutant IFN-β comprises SEQ ID NO: 178 and a mutation at N96, the mutation being an aliphatic hydrophobic residue selected from glycine (G), alanine (A), leucine (L), isoleucine (I), methionine (M), and valine (V) and a mutation at Y92, the mutation being an aliphatic hydrophobic residue selected from glycine (G), alanine (A), leucine (L), isoleucine (I), methionine (M), and valine (V).

[0252] In some embodiments, the mutant IFN-β comprises SEQ ID NO: 178 and a mutation at Y92, the mutation being an aliphatic hydrophobic residue selected from glycine (G), alanine (A), leucine (L), isoleucine (I), methionine (M), and valine (V) and a mutation at 195, the mutation being an aliphatic hydrophobic residue selected from glycine (G), alanine (A), leucine (L), methionine (M), and valine (V) and a mutation at N96, the mutation being an aliphatic hydrophobic residue selected from glycine (G), alanine (A), leucine (L), isoleucine (I), methionine (M), and valine (V).

[0253] In some embodiments, the mutant IFN-β comprises SEQ ID NO: 178 and a mutation at K123, the mutation being an aliphatic hydrophobic residue selected from glycine (G), alanine (A), leucine (L), isoleucine (I), methionine (M), and valine (V).

[0254] In some embodiments, the mutant IFN-β comprises SEQ ID NO: 178 and a mutation at R124, the mutation being an aliphatic hydrophobic residue selected from glycine (G), alanine (A), leucine (L), isoleucine (I), methionine (M), and valine (V).

[0255] In some embodiments, the mutant IFN-β comprises SEQ ID NO: 178 and a mutation at K123, the mutation being an aliphatic hydrophobic residue selected from glycine (G), alanine (A), leucine (L), isoleucine (I), methionine (M), and valine (V) and a mutation at R124, the mutation being an aliphatic hydrophobic residue selected from glycine (G), alanine (A), leucine (L), isoleucine (I), methionine (M), and valine (V).

[0256] In some embodiments, the mutant IFN-β comprises SEQ ID NO: 178 and a mutation at L151, the mutation being an aliphatic hydrophobic residue selected from glycine (G), alanine (A), isoleucine (I), methionine (M), and valine (V).

[0257] In some embodiments, the mutant IFN-β comprises SEQ ID NO: 178 and a mutation at R152, the mutation being an aliphatic hydrophobic residue selected from glycine (G), alanine (A), leucine (L), isoleucine (I), methionine (M), and valine (V).

[0258] In some embodiments, the mutant IFN-β comprises SEQ ID NO: 178 and a mutation at L151, the mutation being an aliphatic hydrophobic residue selected from glycine (G), alanine (A), isoleucine (I), methionine (M), and valine (V) and a mutation at R152, the mutation being an aliphatic hydrophobic residue selected from glycine (G), alanine (A), leucine (L), isoleucine (I), methionine (M), and valine (V).

[0259] In some embodiments, the mutant IFN-β comprises SEQ ID NO: 178 and a mutation at V148, the mutation being an aliphatic hydrophobic residue selected from glycine (G), alanine (A), leucine (L), isoleucine (I), and methionine (M).

[0260] In some embodiments, the mutant IFN-β comprises SEQ ID NO: 178 and a mutation at V148, the mutation being an aliphatic hydrophobic residue selected from glycine (G), alanine (A), leucine (L), isoleucine (I), methionine (M), and valine (V) and a mutation at R152, the mutation being an aliphatic hydrophobic residue selected from glycine (G), alanine (A), leucine (L), isoleucine (I), methionine (M), and valine (V).

[0261] In some embodiments, the mutant IFN-β comprises SEQ ID NO: 178 and a mutation at Y155, the mutation being an aliphatic hydrophobic residue selected from glycine (G), alanine (A), leucine (L), isoleucine (I), methionine (M), and valine (V).

[0262] In some embodiments, the present technology relates to a chimeric protein or Fc-based chimeric protein complex comprising: (a) a modified IFN-β, having the amino acid sequence of SEQ ID NO: 178 and a mutation at position W22, wherein the mutation is an aliphatic hydrophobic residue; and (b) one or more targeting moieties, said targeting moieties comprising recognition domains which specifically bind to antigens or receptors of interest (e.g., FAP), the modified IFN-β and the one or more targeting moieties are optionally connected with one or more linkers. In some embodiments the mutation at position W22 is aliphatic hydrophobic residue is selected from G, A, L, I, M, and V. In some embodiments, the mutation at position W22 is G.

[0263] Additional illustrative IFN-β mutants are provided in PCT/EP2017/061544, the entire disclosure of which is incorporated by reference herein.

[0264] In some embodiments, the signaling agent is a wild type or modified interferon y. In such embodiments, the modified interferon y agent has reduced affinity and/or activity for the interferon-gamma receptor (IFNGR), i.e., IFNGR1 and IFNGR2 chains. In some embodiments, the modified interferon y agent has substantially reduced or ablated affinity and/or activity for the interferon-gamma receptor (IFNGR), i.e., IFNGR1 and/or IFNGR2 chains.

[0265] For example, the mutant IFN-γ can include a mutation, by way of non-limiting example, a truncation. In embodiments, the mutant IFN-γ has a truncation at the C-terminus, e.g. of about 5 to about 20 amino acid residues, or of about 16 amino acid residues, or of about 15 amino acid residues, or of about 14 amino acid residues, or of about 7 amino acid residues, or of about 5 amino acid residues. In embodiments, the mutant IFN-γ has one or more mutations at positions Q1, V5, E9, K12, H19, S20, V22, A23, D24, N25, G26, T27, L30, K108, H111, E112, I114, Q115, A118, E119, and K125. In embodiments, the mutant IFN-γ has one or more mutations are substitutions selected from V5E, S20E, V22A, A23G, A23F, D24G, G26Q, H111A, H111D, I114A, Q115A, and A118G. In embodiments, the mutant IFN-γ comprises the V22A mutation. In embodiments, the mutant IFN-γ comprises the A23G mutation. In embodiments, the mutant IFN-γ comprises the D24G mutation. In embodiments, the mutant IFN-γ comprises the H111A mutation or the H111D mutation. In embodiments, the mutant IFN-γ comprises the I114A mutation. In embodiments, the mutant IFN-γ comprises the Q115A mutation. In embodiments, the mutant IFN-γ comprises the A118G mutation. In embodiments, the mutant IFN-γ comprises the A23G mutation and the D24G mutation. In embodiments, the mutant IFN-γ comprises the 1114A mutation and the A118G mutation. IFN-γ is shown in SEQ ID NO: 1043 below and all mutations are relative to SEQ ID NO: 1043:

(SEQ ID NO: 1043)
MKYTSYILAFQLCIVLGSLGCYCQDPYVKEAENLKKYFNAGHSDVADNGTL
FLGILKNWKEESDRKIMQSQIVSFYFKLFKNFKDDQSIQKSVETIKEDMNV
KFFNSNKKKRDDFEKLTNYSVTDLNVQRKAIHELIQVMAELSPAAKTGKRK
RSQMLFRGRRASQ.

[0266] In an embodiment, the wildtype or modified signaling agent is consensus interferon. In some embodiments, the consensus interferon comprises the amino acid of SEQ ID NO: 179.

[0267] In some embodiments, the consensus interferon is modified to have a mutation at one or more amino acids at positions 33 and/or 145-155, such as amino acid positions 145, 146, 149, 150 and/or 154, with reference to SEQ ID NO: 179. In some embodiments, the consensus interferon is modified to have a mutation at one or more amino acids at positions 33 and/or 145-155, such as amino acid positions 145, 146, 149, 150 and/or 154, with reference to SEQ ID NO: 179, the substitutions optionally being hydrophobic and selected from alanine, valine, leucine, and isoleucine. In some embodiments, the consensus interferon mutant comprises one or more mutations selected from R33A, R145X₁, A146X₂, M149A, R150A, and L154A, wherein X₁ is selected from A, S, T, Y, L, and I, and wherein X₂ is selected from G, H, Y, K, and D with reference to SEQ ID NO: 179.

[0268] In an embodiment, the consensus interferon is modified to have a mutation at amino acid position 121 (i.e., K121), with reference to SEQ ID NO: 179. In an embodiment, the consensus interferon comprises a K121E mutation, with reference to SEQ ID NO: 179.

[0269] In an embodiment, the modified signaling agent comprises any of the consensus interferon variants as disclosed in U.S. Pat. Nos. 4,695,623, 4,897,471, 5,541,293, and 8,496,921, the entire contents of all of which are hereby incorporated by reference. For example, the consensus interferon variant may comprise the amino acid sequence of IFN-CON2 or IFN-CON3 as disclosed in U.S. Pat. Nos. 4,695,623, 4,897,471, and 5,541,293.

[0270] In some embodiments, the wildtype or modified signaling agent is vascular endothelial growth factor (VEGF). VEGF is a potent growth factor that plays major roles in physiological but also pathological angiogenesis, regulates vascular permeability and can act as a growth factor on cells expressing VEGF receptors. Additional functions include, among others, stimulation of cell migration in macrophage lineage and endothelial cells. Several members of the VEGF family of growth factors exist, as well as at least three receptors (VEGFR-1, VEGFR -2, and VEGFR -3). Members of the VEGF family can bind and activate more than one VEGFR type. For example, VEGF-A binds VEGFR-1 and -2, while VEGF-C can bind VEGFR-2 and -3. VEGFR-1 and -2 activation regulates angiogenesis while VEGFR-3 activation is associated with lymphangiogenesis. The major pro-angiogenic signal is generated from activation of VEGFR-2. VEGFR-1 activation has been reported to be possibly associated with negative role in angiogenesis. It has also been reported that VEGFR-1 signaling is important for progression of tumors in vivo via bone marrow-derived VEGFR-1 positive cells (contributing to formation of premetastatic niche in the bone). Several therapies based on VEGF-A directed/neutralizing therapeutic antibodies have been developed, primarily for use in treatment of various human tumors relying on angiogenesis. These are not without side effects though. This may not be surprising considering that these operate as general, non-cell/tissue specific VEGFNEGFR interaction inhibitors. Hence, it would be desirable to restrict VEGF (e.g., VEGF-A) NEGFR-2 inhibition to specific target cells (e.g., tumor vasculature endothelial cells).

[0271] In some embodiments, the VEGF is VEGF-A, VEGF-B, VEFG-C, VEGF-D, or VEGF-E and isoforms thereof including the various isoforms of VEGF-A such as VEGF121, VEGF121b, VEGF145, VEGF165, VEGF165b, VEGF189, and VEGF206. In some embodiments, the modified signaling agent has reduced affinity and/or activity for VEGFR-1 (Flt-1) and/or VEGFR-2 (KDR/Flk-1). In some embodiments, the modified signaling agent has substantially reduced or ablated affinity and/or activity for VEGFR-1 (Flt-1) and/or VEGFR-2 (KDR/Flk-1). In an embodiment, the modified signaling agent has reduced affinity and/or activity for VEGFR-2 (KDR/Flk-1) and/or substantially reduced or ablated affinity and/or activity for VEGFR-1 (Flt-1). Such an embodiment finds use, for example, in wound healing methods or treatment of ischmia-related diseases (without wishing to be bound by theory, mediated by VEGFR-2's effects on endothelial cell function and angiogenesis). In some embodiments, binding to VEGFR-1 (Flt-1), which is linked to cancers and pro-inflammatory activities, is avoided. In some embodiments, VEGFR-1 (Flt-1) acts a decoy receptor and therefore substantially reduces or ablates affinity at this receptor avoids sequestration of the therapeutic agent. In an embodiment, the modified signaling agent has substantially reduced or ablated affinity and/or activity for VEGFR-1 (Flt-1) and/or substantially reduced or ablated affinity and/or activity for VEGFR-2 (KDR/Flk-1). In some embodiments, the VEGF is VEGF-C or VEGF-D. In such embodiments, the modified signaling agent has reduced affinity and/or activity for VEGFR-3. Alternatively, the modified signaling agent has substantially reduced or ablated affinity and/or activity for VEGFR-3.

[0272] Proangiogenic therapies are also important in various diseases (e.g. ischemic heart disease, bleeding etc.), and include VEGF-based therapeutics. Activation of VEGFR-2 is proangiogenic (acting on endothelial cells). Activation of VEFGR-1 can cause stimulation of migration of inflammatory cells (including, for example, macrophages) and lead to inflammation associated hypervascular permeability. Activation of VEFGR-1 can also promote bone marrow associated tumor niche formation. Thus, VEGF based therapeutic selective for VEGFR-2 activation would be desirable in this case. In addition, cell specific targeting, e.g. to endothelial cells, would be desirable.

[0273] In some embodiments, the modified signaling agent has reduced affinity and/or activity (e.g. antagonistic) for VEGFR-2 and/or has substantially reduced or ablated affinity and/or activity for VEGFR-1. When targeted to tumor vasculature endothelial cells via a targeting moiety that binds to a tumor endothelial cell marker (e.g. PSMA and others), such construct inhibits VEGFR-2 activation specifically on such marker-positive cells, while not activating VEGFR-1 en route and on target cells (if activity ablated), thus eliminating induction of inflammatory responses, for example. This would provide a more selective and safe anti-angiogenic therapy for many tumor types as compared to VEGF-A neutralizing therapies.

[0274] In some embodiments, the modified signaling agent has reduced affinity and/or activity (e.g. agonistic) for VEGFR-2 and/or has substantially reduced or ablated affinity and/or activity for VEGFR-1. Through targeting to vascular endothelial cells, such construct, in some embodiments, promotes angiogenesis without causing VEGFR-1 associated induction of inflammatory responses. Hence, such a construct would have targeted proangiogenic effects with substantially reduced risk of side effects caused by systemic activation of VEGFR-2 as well as VEGFR-1.

[0275] In an illustrative embodiment, the wildtype or modified signaling agent is VEGF165 (wild type), which has the amino acid sequence: of SEQ ID NO: 180.

[0276] In another illustrative embodiment, the wildtype or modified signaling agent is VEGF165b (wild type), which has the amino acid sequence of SEQ ID NO: 181.

[0277] In these embodiments, the modified signaling agent has a mutation at amino acid 183 (e.g., a substitution mutation at 183, e.g., 183K, 183R, or 183H). Without wishing to be bound by theory, it is believed that such mutations may result in reduced receptor binding affinity. See, for example, U.S. Pat. No. 9,078,860, the entire contents of which are hereby incorporated by reference.

[0278] In an embodiment, the wildtype or modified signaling agent is TNF-α. TNF is a pleiotropic cytokine with many diverse functions, including regulation of cell growth, differentiation, apoptosis, tumorigenesis, viral replication, autoimmunity, immune cell functions and trafficking, inflammation, and septic shock. It binds to two distinct membrane receptors on target cells: TNFR1 (p55) and TNFR2 (p75). TNFR1 exhibits a very broad expression pattern whereas TNFR2 is expressed preferentially on certain populations of lymphocytes, Tregs, endothelial cells, certain neurons, microglia, cardiac myocytes and mesenchymal stem cells. Very distinct biological pathways are activated in response to receptor activation, although there is also some overlap. As a general rule, without wishing to be bound by theory, TNFR1 signaling is associated with induction of apoptosis (cell death) and TNFR2 signaling is associated with activation of cell survival signals (e.g. activation of NFκB pathway).

[0279] Administration of TNF is systemically toxic, and this is largely due to TNFR1 engagement. However, it should be noted that activation of TNFR2 is also associated with a broad range of activities and, as with TNFR1, in the context of developing TNF based therapeutics, control over TNF targeting and activity is important.

[0280] In some embodiments, the modified signaling agent has reduced affinity and/or activity for TNFR1 and/or TNFR2. In some embodiments, the modified signaling agent has substantially reduced or ablated affinity and/or activity for TNFR1 and/or TNFR2. TNFR1 is expressed in most tissues, and is involved in cell death signaling while, by contrast, TNFR2 is involved in cell survival signaling. Accordingly, in embodiments directed to methods of treating cancer, the modified signaling agent has reduced affinity and/or activity for TNFR1 and/or substantially reduced or ablated affinity and/or activity for TNFR2. In these embodiments, the chimeric proteins or Fc-based chimeric protein complex may be targeted to a cell for which apoptosis is desired, e.g. a tumor cell or a tumor vasculature endothelial cell. In embodiments directed to methods of promoting cell survival, for example, in neurogenesis for the treatment of neurodegenerative disorders, the modified signaling agent has reduced affinity and/or activity for TNFR2 and/or substantially reduced or ablated affinity and/or activity for TNFR1. Stated another way, the present chimeric proteins or Fc-based chimeric protein complex, in some embodiments, comprise modified TNF-a agent that allows of favoring either death or survival signals.

[0281] In some embodiments, the chimeric protein or Fc-based chimeric protein complex has a modified TNF having reduced affinity and/or activity for TNFR1 and/or substantially reduced or ablated affinity and/or activity for TNFR2. Such a chimera or Fc-based chimeric protein complex, in some embodiments, is a more potent inducer of apoptosis as compared to a wild type TNF and/or a chimera or Fc-based chimeric protein complex bearing only mutation(s) causing reduced affinity and/or activity for TNFR1. Such a chimera or Fc-based chimeric protein complex, in some embodiments, finds use in inducing tumor cell death or a tumor vasculature endothelial cell death (e.g. in the treatment of cancers). Also, in some embodiments, these chimeras or Fc-based chimeric protein complex avoid or reduce activation of Treg cells via TNFR2, for example, thus, further supporting TNFR1-mediated antitumor activity in vivo.

[0282] In some embodiments, the chimeric protein or Fc-based chimeric protein complex has a modified TNF having reduced affinity and/or activity for TNFR2 and/or substantially reduced or ablated affinity and/or activity for TNFR1. Such a chimera or Fc-based chimeric protein complex, in some embodiments, is a more potent activator of cell survival in some cell types, which may be a specific therapeutic objective in various disease settings, including without limitation, stimulation of neurogenesis. In addition, such a TNFR2-favoring chimeras or Fc-based chimeric protein complex also are useful in the treatment of autoimmune diseases (e.g. Crohn's, diabetes, MS, colitis etc. and many others described herein). In some embodiments, the chimera or Fc-based chimeric protein complex is targeted to auto-reactive T cells. In some embodiments, the chimera or Fc-based chimeric protein complex promotes Treg cell activation and indirect suppression of cytotoxic T cells.

[0283] In some embodiments, the chimera or Fc-based chimeric protein complex causes the death of auto-reactive T cells, e.g. by activation of TNFR2 and/or avoidance of TNFR1 (e.g. a modified TNF having reduced affinity and/or activity for TNFR2 and/or substantially reduced or ablated affinity and/or activity for TNFR1). Without wishing to be bound by theory these auto-reactive T cells, have their apoptosis/survival signals altered e.g. by NFκB pathway activity/signaling alterations. In some embodiments, the chimera or Fc-based chimeric protein complex causes the death of autoreactive T cells having lesions or modifications in the NFκB pathway, which underlie an imbalance of their cell death (apoptosis)/survival signaling properties and, optionally, altered susceptibility to certain death-inducing signals (e.g., TNFR2 activation).

[0284] In some embodiments, a TNFR2 based chimera or Fc-based chimeric protein complex has additional therapeutic applications in diseases, including various autoimmune diseases, heart disease, de-myelinating and neurodegenerative disorders, and infectious disease, among others.

[0285] In an embodiment, the wild type TNF-α has the amino acid sequence of: SEQ ID NO: 182.

[0286] In such embodiments, the modified TNF-α agent has mutations at one or more amino acid positions 29, 31, 32, 84, 85, 86, 87, 88, 89, 145, 146 and 147, which produces a modified TNF-α with reduced receptor binding affinity. See, for example, U.S. Pat. No. 7,993,636, the entire contents of which are hereby incorporated by reference.

[0287] In some embodiments, the modified human TNF-α moiety has mutations at one or more amino acid positions R32, N34, Q67, H73, L75, T77, S86, Y87, V91, I97, T105, P106, A109, P113, Y115, E127, N137, D143, A145, and E146, as described, for example, in WO/2015/007903, the entire contents of which is hereby incorporated by reference (numbering according to the human TNF sequence, Genbank accession number BAG70306, version BAG70306.1 GI: 197692685). In some embodiments, the modified human TNF-α moiety has substitution mutations selected from L29S, R32G, R32W, N34G, Q67G, H73G, L75G, L75A, L75S, T77A, S86G, S86T, Y87Q, Y87L, Y87A, Y87F, Y87H, V91G, V91A, 197A, 197Q, 197S, T105G, P106G, A109Y, P113G, Y115G, Y115A, E127G, N137G, D143N, A145G, A145R, A145T, E146D, E146K, and S147D. In an embodiment, the human TNF-α moiety has a mutation selected from Y87Q, Y87L, Y87A, Y87F, and Y87H. In another embodiment, the human TNF-α moiety has a mutation selected from 197A, 197Q, and 197S. In a further embodiment, the human TNF-α moiety has a mutation selected from Y115A and Y115G. In an embodiment, the human TNF-α moiety has an E146K mutation. In an embodiment, the human TNF-α moiety has an Y87H and an E146K mutation. In an embodiment, the human TNF-α moiety has an Y87H and an A145R mutation.

[0288] In an embodiment, the human TNF-α moiety has a R32W and a S86T mutation. In an embodiment, the human TNF-α moiety has a R32W and an E146K mutation. In an embodiment, the human TNF-α moiety has a L29S and a R32W mutation. In an embodiment, the human TNF-α moiety has a D143N and an A145R mutation. In an embodiment, the human TNF-α moiety has a D143N and an A145R mutation. In an embodiment, the human TNF-α moiety has an A145T, an E146D, and a S147D mutation. In an embodiment, the human TNF-α moiety has an A145T and a S147D mutation.

[0289] In some embodiments, the modified TNF-α agent has one or more mutations selected from N39Y, S147Y, and Y87H, as described in WO 2008/124086, the entire contents of which is hereby incorporated by reference.

[0290] In some embodiments, the modified human TNF-α moiety has mutations that provide receptor selectivity as described in PCT/IB2016/001668, the entire contents of which are hereby incorporated by reference. In some embodiments, the mutations to TNF are TNF-R1 selective. In some embodiments, the mutations to TNF which are TNF-R1 selective are at one or more of positions R32, S86, and E146. In some embodiments, the mutations to TNF which are TNF-R1 selective are one or more of R32W, S86T, and E146K. In some embodiments, the mutations to TNF which are TNF-R1 selective are one or more of R32W, R32W/S86T, R32W/E146K and E146K. In some embodiments, the mutations to TNF are TNF-R2 selective. In some embodiments, the mutations to TNF which are TNF-R2 selective are at one or more of positions A145, E146, and S147. In some embodiments, the mutations to TNF which are TNF-R2 selective are one or more of A145T, A145R, E146D, and S147D. In some embodiments, the mutations to TNF which are TNF-R2 selective are one or more of A145R, A145T/S147D, and A145T/E146D/S 147D.

[0291] In some embodiments, the wildtype or modified signaling agent is TNF-β. TNF-β forms a homotrimer or a heterotrimer with LT-β (LT-α1β2). In some embodiments, the modified signaling agent has substantially reduced or ablated affinity and/or activity for TNFR1 and/or TNFR2 and/or herpes virus entry mediator (HEVM) and/or LT-βR.

[0292] In an embodiment, the wild type TNF-β has the amino acid sequence of: SEQ ID NO: 183.

[0293] In such embodiments, the modified soluble agent may comprise mutations at one or more amino acids at positions 106-113, which produce a modified TNF-β with reduced receptor binding affinity to TNFR2. In an embodiment, the modified soluble agent has one or more substitution mutations at amino acid positions 106-113. In some embodiments, the substitution mutations are selected from Q107E, Q107D, S106E, 5106D, Q107R, Q107N, Q107E/S106E, Q107E/S106D, Q107D/S106E, and Q107D/S106D. In another embodiment, the modified soluble agent has an insertion of about 1 to about 3 amino acids at positions 106-113.

[0294] In some embodiments, the modified agent is a TNF family member (e.g. TNF-alpha, TNF-beta), which can be a single chain trimeric version as described in WO 2015/007903, the entire contents of which are incorporated by reference.

[0295] In some embodiments, the modified agent is a TNF family member (e.g. TNF-alpha, TNF-beta), which has reduced affinity and/or activity, i.e. antagonistic activity (e.g. natural antagonistic activity or antagonistic activity that is the result of one or more mutations, see, e.g., WO 2015/007520, the entire contents of which are hereby incorporated by reference) at TNFR1. In these embodiments, the modified agent is a TNF family member (e.g. TNF-alpha, TNF-beta), which also, optionally, has substantially reduced or ablated affinity and/or activity for TNFR2. In some embodiments, the modified agent is a TNF family member (e.g. TNF-alpha, TNF-beta) which has reduced affinity and/or activity, i.e. antagonistic activity (e.g. natural antagonistic activity or antagonistic activity that is the result of one or more mutations, see, e.g., WO 2015/007520, the entire contents of which are hereby incorporated by reference) at TNFR2. In these embodiments, the modified agent is a TNF family member (e.g. TNF-alpha, TNF-beta) which also, optionally, has substantially reduced or ablated affinity and/or activity for TNFR1. The constructs of such embodiments find use in, for example, methods of dampening TNF response in a cell specific manner. In some embodiments, the antagonistic TNF family member (e.g. TNF-alpha, TNF-beta) is a single chain trimeric version as described in WO 2015/007903.

[0296] In some embodiments, the wildtype or modified signaling agent is TRAIL. In some embodiments, the modified TRAIL agent has reduced affinity and/or activity for DR4 (TRAIL-RI) and/or DR5 (TRAIL-RII) and/or DcR1 and/or DcR2. In some embodiments, the modified TRAIL agent has substantially reduced or ablated affinity and/or activity for DR4 (TRAIL-RI) and/or DR5 (TRAIL-RII) and/or DcR1 and/or DcR2.

[0297] In an embodiment, the wild type TRAIL has the amino acid sequence of: SEQ ID NO: 184.

[0298] In such embodiments, the modified TRAIL agent may comprise a mutation at amino acid positions T127-R132, E144-R149, E155-H161, Y189-Y209, T214-1220, K224-A226, W231, E236-L239, E249-K251, T261-H264 and H270-E271 (Numbering based on the human sequence, Genbank accession number NP_003801, version 10 NP_003801.1, GI: 4507593; see above).

[0299] In some embodiments, the modified TRAIL agent may comprise one or more mutations that substantially reduce its affinity and/or activity for TRAIL-R1. In such embodiments, the modified TRAIL agent may specifically bind to TRIL-R2. Illustrative mutations include mutations at one or more amino acid positions Y189, R191, Q193, H264, 1266, and D267. For example, the mutations may be one or more of Y189Q, R191K, Q193R, H264R, 1266L and D267Q. In an embodiment, the modified TRAIL agent comprises the mutations Y189Q, R191K, Q193R, H264R, 1266L and D267Q.

[0300] In some embodiments, the modified TRAIL agent may comprise one or more mutations that substantially reduce its affinity and/or activity for TRAIL-R2. In such embodiments, the modified TRAIL agent may specifically bind to TRIL-R1. Illustrative mutations include mutations at one or more amino acid positions G131, R149, S159, N199, K201, and S215. For example, the mutations may be one or more of G131R, R1491, S159R, N199R, K201H, and S215D. In an embodiment, the modified TRAIL agent comprises the mutations G131R, R1491, S159R, N199R, K201H, and S215D. Additional TRAIL mutations are described in, for example, Trebing et al., (2014) Cell Death and Disease, 5:e1035, the entire disclosure of which is hereby incorporated by reference.

[0301] In some embodiments, the wildtype or modified signaling agent is TGFa. In such embodiments, the modified TGFa agent has reduced affinity and/or activity for the epidermal growth factor receptor (EGFR). In some embodiments, the modified TGFa agent has substantially reduced or ablated affinity and/or activity for the epidermal growth factor receptor (EGFR).

[0302] In some embodiments, the wildtype or modified signaling agent is TGFβ. In such embodiments, the modified signaling agent has reduced affinity and/or activity for TGFBR1 and/or TGFBR2. In some embodiments, the modified signaling agent has substantially reduced or ablated affinity and/or activity for TGFBR1 and/or TGFBR2. In some embodiments, the modified signaling agent optionally has reduced or substantially reduced or ablated affinity and/or activity for TGFBR3 which, without wishing to be bound by theory, may act as a reservoir of ligand for TGF-beta receptors. In some embodiments, the TGFβ favors TGFBR1 over TGFBR2 or TGFBR2 over TGFBR1. Similarly, LAP, without wishing to be bound by theory, may act as a reservoir of ligand for TGF-beta receptors. In some embodiments, the modified signaling agent has reduced affinity and/or activity for TGFBR1 and/or TGFBR2 and/or substantially reduced or ablated affinity and/or activity for Latency Associated Peptide (LAP). In some embodiments, such chimeras or Fc-based chimeric protein complex find use in Camurati-Engelmann disease, or other diseases associated with inappropriate TGFβ signaling.

[0303] In some embodiments, the modified agent is a TGF family member (e.g. TGFα, TGFβ), which has reduced affinity and/or activity, i.e. antagonistic activity (e.g. natural antagonistic activity or antagonistic activity that is the result of one or more mutations, see, e.g., WO 2015/007520, the entire contents of which are hereby incorporated by reference) at one or more of TGFBR1, TGFBR2, TGFBR3. In these embodiments, the modified agent is a TGF family member (e.g. TGFα, TGFβ) which also, optionally, has substantially reduced or ablated affinity and/or activity at one or more of TGFBR1, TGFBR2, TGFBR3.

[0304] In some embodiments, the modified agent is a TGF family member (e.g. TGFα, TGFβ) which has reduced affinity and/or activity, i.e. antagonistic activity (e.g. natural antagonistic activity or antagonistic activity that is the result of one or more mutations, see, e.g., WO 2015/007520, the entire contents of which are hereby incorporated by reference) at TGFBR1 and/or TGFBR2. In these embodiments, the modified agent is a TGF family member (e.g. TGFα, TGFβ) which also, optionally, has substantially reduced or ablated affinity and/or activity at TGFBR3.

[0305] In some embodiments, the wildtype or modified signaling agent is an interleukin. In an embodiment, the wildtype or modified signaling agent is IL-1. In some embodiments, the wildtype or modified signaling agent is IL-1α or IL-1β. In some embodiments, the modified signaling agent has reduced affinity and/or activity for IL-1R1 and/or IL-1RAcP. In some embodiments, the modified signaling agent has substantially reduced or ablated affinity and/or activity for IL-1R1 and/or IL-1RAcP.

[0306] In some embodiments, the modified signaling agent has reduced affinity and/or activity for IL-1R2. In some embodiments, the modified signaling agent has substantially reduced or ablated affinity and/or activity for IL-1R2. For instance, in some embodiments, the present modified IL-1β agents avoid interaction at IL-1R2 and therefore substantially reduce its function as a decoy and/or sink for therapeutic agents.

[0307] In an embodiment, the wild type IL-1β has the amino acid sequence of: SEQ ID NO: 185.

[0308] IL-1β is a proinflammatory cytokine and an important immune system regulator. It is a potent activator of CD4 T cell responses, increases proportion of Th17 cells and expansion of IFNγ and IL-4 producing cells. IL-1β is also a potent regulator of CD8+ T cells, enhancing antigen-specific CD8+ T cell expansion, differentiation, migration to periphery and memory. IL-1β receptors comprise IL-1R1 and IL-1R2. Binding to and signaling through the IL-1R1 constitutes the mechanism whereby IL-1 mediates many of its biological (and pathological) activities. IL1-R2 can function as a decoy receptor, thereby reducing IL-1 availability for interaction and signaling through the IL-1R1.

[0309] In some embodiments, the modified IL-1β has reduced affinity and/or activity (e.g. agonistic activity) for IL-1R1. In some embodiments, the modified IL-1 has substantially reduced or ablated affinity and/or activity for IL-1R2. In such embodiments, there is restorable IL-1β/ IL-1R1 signaling and prevention of loss of therapeutic chimeras at IL-R2 and therefore a reduction in dose of IL-1β that is required (e.g. relative to wild type or a chimera bearing only an attenuation mutation for IL-R1). Such constructs find use in, for example, methods of treating cancer, including, for example, stimulating the immune system to mount an anti-cancer response.

[0310] In some embodiments, the modified IL-1β has reduced affinity and/or activity (e.g. antagonistic activity, e.g. natural antagonistic activity or antagonistic activity that is the result of one or more mutations, see, e.g., WO 2015/007520, the entire contents of which are hereby incorporated by reference) for IL-1R1. In some embodiments, the modified IL-1β has substantially reduced or ablated affinity and/or activity for IL-1R2. In such embodiments, there is the IL-1β/IL-1R1 signaling is not restorable and prevention of loss of therapeutic chimeras at IL-R2 and therefore a reduction in dose of IL-1β that is required (e.g. relative to wild type or a chimera bearing only an attenuation mutation for IL-R1). Such constructs find use in, for example, methods of treating autoimmune diseases, including, for example, suppressing the immune system.

[0311] In such embodiments, the modified signaling agent has a deletion of amino acids 52-54 which produces a modified human IL-1β with reduced binding affinity for type I IL-1R and reduced biological activity. See, for example, WO 1994/000491, the entire contents of which are hereby incorporated by reference. In some embodiments, the modified human IL-1β has one or more substitution mutations selected from A117G/P118G, R120X, L122A, T125G/L126G, R127G, Q130X, Q131G, K132A, S137G/Q138Y, L145G, H146X, L145A/L147A, Q148X, Q148G/Q150G, Q150G/D151A, M152G, F162A, F162A/Q164E, F166A, Q164E/E167K, N169G/D170G, I172A, V174A, K208E, K209X, K209A/K210A, K219X, E221X, E221 S/N224A, N224S/K225S, E244K, N245Q (where X can be any change in amino acid, e.g., a non-conservative change), which exhibit reduced binding to IL-1R, as described, for example, in WO 2015/007542 and WO/2015/007536, the entire contents of which is hereby incorporated by reference (numbering base on the human IL-1β sequence, Genbank accession number NP_000567, version NP-000567.1 , GI: 10835145). In some embodiments, the modified human IL-1β may have one or more mutations selected from R120A, R120G, Q130A, Q130W, H146A, H146G, H146E, H146N, H146R, Q148E, Q148G, Q148L, K209A, K209D, K219S, K219Q, E221S and E221K. In an embodiment, the modified human IL-1β comprises the mutations Q131G and Q148G. In an embodiment, the modified human IL-1β comprises the mutations Q148G and K208E. In an embodiment, the modified human IL-1β comprises the mutations R120G and Q131G. In an embodiment, the modified human IL-1β comprises the mutations R120G and H146A. In an embodiment, the modified human IL-1β comprises the mutations R120G and H146N. In an embodiment, the modified human IL-1β comprises the mutations R120G and H146R. In an embodiment, the modified human IL-1β comprises the mutations R120G and H146E. In an embodiment, the modified human IL-1β comprises the mutations R120G and H146G. In an embodiment, the modified human IL-1β comprises the mutations R120G and K208E. In an embodiment, the modified human IL-1β comprises the mutations R120G, F162A, and Q164E.

[0312] In some embodiments, the wildtype or modified signaling agent is IL-2. In such an embodiment, the modified signaling agent has reduced affinity and/or activity for IL-2Rα and/or IL-2Rβ and/or IL-2R₇. In some embodiments, the modified signaling agent has reduced affinity and/or activity for IL-2Rβ and/or IL-2Rγ. In some embodiments, the modified signaling agent has substantially reduced or ablated affinity and/or activity for IL-2Rα. Such embodiments may be relevant for treatment of cancer, for instance when the modified IL-2 is agonistic at IL-2Rβ and/or IL-2Rγ. For instance, the present constructs may favor attenuated activation of CD8+ T cells (which can provide an anti-tumor effect), which have IL2 receptors β and γ and disfavor Tregs (which can provide an immune suppressive, pro-tumor effect), which have IL2 receptors α, β, and γ. Further, in some embodiments, the preference for IL-2Rβ and/or IL-2Rγ over IL-2Rα avoids IL-2 side effects such as pulmonary edema. Also, IL-2-based chimeras or Fc-based chimeric protein complex are useful for the treatment of autoimmune diseases, for instance when the modified IL-2 is antagonistic (e.g. natural antagonistic activity or antagonistic activity that is the result of one or more mutations, see, e.g., WO 2015/007520, the entire contents of which are hereby incorporated by reference) at IL-2Rβ and/or IL-2Rγ. For instance, the present constructs may favor attenuated suppression of CD8+ T cells (and therefore dampen the immune response), which have IL2 receptors β and γ and disfavor Tregs which have IL2 receptors α, β, and γ. Alternatively, in some embodiments, the chimeras or Fc-based chimeric protein complex bearing IL-2 favor the activation of Tregs, and therefore immune suppression, and activation of disfavor of CD8+ T cells. For instance, these constructs find use in the treatment of diseases or diseases that would benefit from immune suppression, e.g. autoimmune disorders.

[0313] In some embodiments, the chimeric protein or Fc-based chimeric protein complex has targeting moieties as described herein directed to FAP+ dendritic cells as well as a modified IL-2 agent having reduced affinity and/or activity for IL-2Rβ, and/or IL-2Rγ and/or substantially reduced or ablated affinity and/or activity for IL-2Rα. In some embodiments, these constructs provide targeted FAP+ dendritic cell activity and are generally inactive (or have substantially reduced activity) towards Treg cells. In some embodiments, such constructs have enhanced immune stimulatory effect compared to wild type IL-2 (e.g., without wishing to be bound by theory, by not stimulating Tregs), whilst eliminating or reducing the systemic toxicity associated with IL-2.

[0314] In some embodiments, the wild type IL-2 has the amino acid sequence of: SEQ ID NO: 186.

[0315] In such embodiments, the modified IL-2 agent has one or more mutations at amino acids L72 (L72G, L72A, L725, L72T, L72Q, L72E, L72N, L72D, L72R, or L72K), F42 (F42A, F42G, F42S, F42T, F42Q, F42E, F42N, F42D, F42R, or F42K) and Y45 (Y45A, Y45G, Y45S, Y45T, Y45Q, Y45E, Y45N, Y45D, Y45R or Y45K). Without wishing to be bound by theory, it is believed that these modified IL-2 agents have reduced affinity for the high-affinity IL-2 receptor and preserves affinity to the intermediate-affinity IL-2 receptor, as compared to the wild-type IL-2. See, for example, US Patent Publication No. 2012/0244112, the entire contents of which are hereby incorporated by reference.

[0316] In some embodiments, the modified IL-2 agent has one or more mutations at amino acids R38, F42, Y45, and E62. For example, the modified IL-2 agent may comprise one or more of R38A, F42A, Y45A, and E62A. In some embodiments, the modified IL-2 agent may comprise a mutation at C125. For example, the mutation may be C125S. In such embodiments, the modified IL-2 agent may have substantially reduced affinity and/or activity for IL-2Rα, as described in, for example, Carmenate et al. (2013) The Journal of Immunology, 190:6230-6238, the entire disclosure of which is hereby incorporated by reference. In some embodiments, the modified IL-2 agent with mutations at R38, F42, Y45, and/or E62 is able to induce an expansion of effector cells including CD8+ T cells and NK cells but not Treg cells. In some embodiments, the modified IL-2 agent with mutations at R38, F42, Y45, and/or E62 is less toxic than wildtype IL-2 agents. A chimeric protein or Fc-based chimeric protein complex comprising the modified IL-2 agent with substantially reduced affinity and/or activity for IL-2Rα may find application in oncology for example.

[0317] In other embodiments, the modified IL-2 agent may have substantially reduced affinity and/or activity for IL-2Rβ, as described in, for example, WO 2016/025385, the entire disclosure of which is hereby incorporated by reference. In such embodiments, the modified IL-2 agent may induce an expansion of Treg cells but not effector cells such as CD8+ T cells and NK cells. A chimeric protein or Fc-based chimeric protein complex comprising the modified IL-2 agent with substantially reduced affinity and/or activity for IL-2Rβ may find application in the treatment of autoimmune disease for example. In some embodiments, the modified IL-2 agent may comprise one or more mutations at amino acids N88, D20, and/or A126. For example, the modified IL-2 agent may comprise one or more of N88R, N881, N88G, D2OH, Q126L, and Q126F.

[0318] In some embodiments, the modified IL-2 agent may comprise a mutation at D109 or C125. For example, the mutation may be D109C or C125S. In some embodiments, the modified IL-2 with a mutation at D109 or C125 may be utilized for attachment to a PEG moiety.

[0319] In some embodiments, the wildtype or modified signaling agent is IL-3. In some embodiments, the modified signaling agent has reduced affinity and/or activity for the IL-3 receptor, which is a heterodimer with a unique alpha chain paired with the common beta (beta c or CD131) subunit. In some embodiments, the modified signaling agent has substantially reduced or ablated affinity and/or activity for the IL-3 receptor, which is a heterodimer with a unique alpha chain paired with the common beta (beta c or CD131) subunit.

[0320] In some embodiments, the wildtype or modified signaling agent is IL-4. In such an embodiment, the modified signaling agent has reduced affinity and/or activity for type 1 and/or type 2 IL-4 receptors. In such an embodiment, the modified signaling agent has substantially reduced or ablated affinity and/or activity for type 1 and/or type 2 IL-4 receptors. Type 1 IL-4 receptors are composed of the IL-4Rα subunit with a common γ chain and specifically bind IL-4. Type 2 IL-4 receptors include an IL-4Rα subunit bound to a different subunit known as IL-13Rα1. In some embodiments, the modified signaling agent has substantially reduced or ablated affinity and/or activity the type 2 IL-4 receptors.

[0321] In some embodiments, the wild type IL-4 has the amino acid sequence of: SEQ ID NO: 187.

[0322] In such embodiments, the modified IL-4 agent has one or more mutations at amino acids R121 (R121A, R121D, R121E, R121F, R121H, R121I, R121K, R121N, R121P, R121T, R121W), E122 (E122F), Y124 (Y124A, Y124Q, Y124R, Y124S, Y124T), and S125 (S125A). Without wishing to be bound by theory, it is believed that these modified IL-4 agents maintain the activity mediated by the type I receptor, but significantly reduces the biological activity mediated by the other receptors. See, for example, U.S. Pat. No. 6,433,157, the entire contents of which are hereby incorporated by reference.

[0323] In some embodiments, the wildtype or modified signaling agent is IL-6. IL-6 signals through a cell-surface type I cytokine receptor complex including the ligand-binding IL-6R chain (CD126), and the signal-transducing component gp130. IL-6 may also bind to a soluble form of IL-6R (sIL-6R), which is the extracellular portion of IL-6R. The sIL-6R/IL-6 complex may be involved in neurites outgrowth and survival of neurons and, hence, may be important in nerve regeneration through remyelination. Accordingly, in some embodiments, the modified signaling agent has reduced affinity and/or activity for IL-6R/gp130 and/or sIL-6R. In some embodiments, the modified signaling agent has substantially reduced or ablated affinity and/or activity for IL-6R/gp130 and/or sIL-6R.

[0324] In some embodiments, the wild type IL-6 has the amino acid sequence of SEQ ID NO: 188.

[0325] In such embodiments, the modified signaling agent has one or more mutations at amino acids 58, 160, 163, 171 or 177. Without wishing to be bound by theory, it is believed that these modified IL-6 agents exhibit reduced binding affinity to IL-6R-alpha and reduced biological activity. See, for example, WO 97/10338, the entire contents of which are hereby incorporated by reference.

[0326] In some embodiments, the wildtype or modified signaling agent is IL-10. In such an embodiment, the modified signaling agent has reduced affinity and/or activity for IL-10 receptor-1 and IL-10 receptor-2. In some embodiments, the modified signaling agent has substantially reduced or ablated affinity and/or activity for IL-10 receptor-1 and IL-10 receptor-2

[0327] In some embodiments, the wildtype or modified signaling agent is IL-11. In such an embodiment, the modified signaling agent has reduced affinity and/or activity for IL-11Rα and/or IL-11Rβ and/or gp130. In such an embodiment, the modified signaling agent has substantially reduced or ablated affinity and/or activity for IL-11Rα and/or IL-11Rβ and/or gp130.

[0328] In some embodiments, the wildtype or modified signaling agent is IL-12. In such an embodiment, the modified signaling agent has reduced affinity and/or activity for IL-12Rβ1 and/or IL-12Rβ2. I n such an embodiment, the modified signaling agent has substantially reduced or ablated affinity and/or activity for IL-12Rβ1 and/or IL-12Rβ2.

[0329] In some embodiments, the wildtype or modified signaling agent is IL-13. In such an embodiment, the modified signaling agent has reduced affinity and/or activity for the IL-4 receptor (IL-4Rα) and IL-13Rα1. In some embodiments, the modified signaling agent has substantially reduced or ablated affinity and/or activity for IL-4 receptor (IL-4Rα) or IL-13Rα1.

[0330] In some embodiments, the wild type IL-13 has the amino acid sequence: SEQ ID NO: 189.

[0331] In such embodiments, the modified IL-13 agent has one or more mutations at amino acids 13, 16, 17, 66, 69, 99, 102, 104, 105, 106, 107, 108, 109, 112, 113 and 114. Without wishing to be bound by theory, it is believed that these modified IL-13 agents exhibit reduced biological activity. See, for example, WO 2002/018422, the entire contents of which are hereby incorporated by reference.

[0332] In an embodiment, the signaling agent is a wild type or modified IL-15. In embodiments, the modified IL-15 has reduced affinity and/or activity for interleukin 15 receptor.

[0333] In an embodiment, the wild type IL-15 has the amino acid sequence of:

(SEQ ID NO: 1044)
NWVNVISDLKKIEDLIQSMHIDATLYTESDVHPSCKVTAMKCFLLELQVIS
LESGDASIHDTVENLIILANNSLSSNGNVTESGCKECEELEEKNIKEFLQS
FVHIVQMFINTS.

[0334] In such embodiments, the modified IL-15 agent has one or more mutations at amino acids S7, D8, K10, K11, E46, L47, V49, 150, D61, N65, L66, I67, I68, L69, N72, Q108 with respect to SEQ ID NO: 1044.

[0335] In some embodiments, the wildtype or modified signaling agent is IL-18. In some embodiments, the modified signaling agent has reduced affinity and/or activity for IL-18Rα and/or IL-18Rβ. In some embodiments, the modified signaling agent has substantially reduced or ablated affinity and/or activity for IL-18Rα and/or IL-18Rβ. In some embodiments, the modified signaling agent has substantially reduced or ablated affinity and/or activity for IL-18Rα type II, which is an isoform of IL-18Rα that lacks the TIR domain required for signaling.

[0336] In some embodiments, the wild type IL-18 has the amino acid sequence: SEQ ID NO: 190.

[0337] In such embodiments, the modified IL-18 agent may comprise one or more mutations in amino acids or amino acid regions selected from Y37-K44, R49-Q54, D59-R63, E67-C74, R80, M87-A97, N 27-K129, Q139-M149, K165-K171, R183 and Q190-N191, as described in WO/2015/007542, the entire contents of which are hereby incorporated by reference (numbering based on the human IL-18 sequence, Genbank accession number AAV38697, version AAV38697.1, GI: 54696650).

[0338] In some embodiments, the wildtype or modified signaling agent is IL-33. In such an embodiment, the modified signaling agent has reduced affinity and/or activity for the ST-2 receptor and IL-1RAcP. In some embodiments, the modified signaling agent has substantially reduced or ablated affinity and/or activity for the ST-2 receptor and IL-1RAcP.

[0339] In some embodiments, the wild type IL-33 has the amino acid sequence of: SEQ ID NO: 191.

[0340] In such embodiments, the modified IL-33 agent may comprise one or more mutations in amino acids or amino acid regions selected from 1113-Y122, 5127-E139, E144-D157, Y163-M183, E200, Q215, L220-C227 and T260-E269, as described in WO/2015/007542, the entire contents of which are hereby incorporated by reference (numbering based on the human sequence, Genbank accession number NP_254274, version NP_254274.1, GI:15559209).

[0341] In some embodiments, the wildtype or modified signaling agent is epidermal growth factor (EGF). EGF is a member of a family of potent growth factors. Members include EGF, HB-EGF, and others such as TGFalpha, amphiregulin, neuregulins, epiregulin, betacellulin. EGF family receptors include EGFR (ErbB1), ErbB2, ErbB3 and ErbB4. These may function as homodimeric and /or heterodimeric receptor subtypes. The different EGF family members exhibit differential selectivity for the various receptor subtypes. For example, EGF associates with ErbB1/ErbB1, ErbB1/ErbB2, ErbB4/ErbB2 and some other heterodimeric subtypes. HB-EGF has a similar pattern, although it also associates with ErbB4/4. Modulation of EGF (EGF-like) growth factor signaling, positively or negatively, is of considerable therapeutic interest. For example, inhibition of EGFRs signaling is of interest in the treatment of various cancers where EGFR signaling constitutes a major growth-promoting signal. Alternatively, stimulation of EGFRs signaling is of therapeutic interest in, for example, promoting wound healing (acute and chronic), oral mucositis (a major side effect of various cancer therapies, including, without limitation radiation therapy).

[0342] In some embodiments, the modified signaling agent has reduced affinity and/or activity for ErbB1, ErbB2, ErbB3, and/or ErbB4. Such embodiments find use, for example, in methods of treating wounds. In some embodiments, the modified signaling agent binds to one or more ErbB1, ErbB2, ErbB3, and ErbB4 and antagonizes the activity of the receptor. In such embodiments, the modified signaling agent has reduced affinity and/or activity for ErbB1, ErbB2, ErbB3, and/or ErbB4 that allows for the activity of the receptor to be antagonized in an attenuated fashion. Such embodiments find use in, for example, treatments of cancer. In an embodiment, the modified signaling agent has reduced affinity and/or activity for ErbB1. ErbB1 is the therapeutic target of kinase inhibitors most have side effects because they are not very selective (e.g., gefitinib, erlotinib, afatinib, brigatinib and icotinib). In some embodiments, attenuated antagonistic ErbB1 signaling is more on-target and has less side effects than other agents targeting receptors for EGF.

[0343] In some embodiments, the modified signaling agent has reduced affinity and/or activity (e.g. antagonistic e.g. natural antagonistic activity or antagonistic activity that is the result of one or more mutations, see, e.g., WO 2015/007520, the entire contents of which are hereby incorporated by reference) for ErbB1 and/or substantially reduced or ablated affinity and/or activity for ErbB4 or other subtypes it may interact with. Through specific targeting via the targeting moiety, cell-selective suppression (antagonism e.g. natural antagonistic activity or antagonistic activity that is the result of one or more mutations, see, e.g., WO 2015/007520, the entire contents of which are hereby incorporated by reference) of ErbB1/ErbB1 receptor activation would be achieved while not engaging other receptor subtypes potentially associated with inhibition-associated side effects. Hence, in contrast to EGFR kinase inhibitors, which inhibit EGFR activity in all cell types in the body, such a construct would provide a cell-selective (e.g., tumor cell with activated EGFR signaling due to amplification of receptor, overexpression etc.) anti-EGFR (ErbB1) drug effect with reduced side effects.

[0344] In some embodiments, the modified signaling agent has reduced affinity and/or activity (e.g. agonistic) for ErbB4 and/or other subtypes it may interact with. Through targeting to specific target cells through the targeting moiety, a selective activation of ErbB1 signaling is achieved (e.g. epithelial cells). Such a construct finds use, in some embodiments, in the treatment of wounds (promoting would healing) with reduced side effects, especially for treatment of chronic conditions and application other than topical application of a therapeutic (e.g. systemic wound healing).

[0345] In an embodiment, the wildtype or modified signaling agent is insulin or insulin analogs. In some embodiments, the modified insulin or insulin analog has reduced affinity and/or activity for the insulin receptor and/or IGF1 or IGF2 receptor. In some embodiments, the modified insulin or insulin analog has substantially reduced or ablated affinity and/or activity for the insulin receptor and/or IGF1 or IGF2 receptor. Attenuated response at the insulin receptor allows for the control of diabetes, obesity, metabolic disorders and the like while directing away from IGF1 or IGF2 receptor avoids pro-cancer effects.

[0346] In an embodiment, the wildtype or modified signaling agent is insulin-like growth factor-I or insulin-like growth factor-II (IGF-1 or IGF-2). In an embodiment, the modified signaling agent is IGF-1. In such an embodiment, the modified signaling agent has reduced affinity and/or activity for the insulin receptor and/or IGF1 receptor. In an embodiment, the modified signaling agent may bind to the IGF1 receptor and antagonize the activity of the receptor. In such an embodiment, the modified signaling agent has reduced affinity and/or activity for IGF1 receptor that allows for the activity of the receptor to be antagonized in an attenuated fashion. In some embodiments, the modified signaling agent has substantially reduced or ablated affinity and/or activity for the insulin receptor and/or IGF1 receptor. In some embodiments, the modified signaling agent has reduced affinity and/or activity for IGF2 receptor that allows for the activity of the receptor to be antagonized in an attenuated fashion. In an embodiment, the modified signaling agent has substantially reduced or ablated affinity and/or activity for the insulin receptor and accordingly does not interfere with insulin signaling. In some embodiments, this applies to cancer treatment. In some embodiments, the present agents may prevent IR isoform A from causing resistance to cancer treatments.

[0347] In an embodiment, the wildtype or modified signaling agent is EPO. In various embodiments, the modified EPO agent has reduced affinity and/or activity for the EPO receptor (EPOR) receptor and/or the ephrin receptor (EphR) relative to wild type EPO or other EPO based agents described herein. In some embodiments, the modified EPO agent has substantially reduced or ablated affinity and/or activity for the EPO receptor (EPOR) receptor and/or the Eph receptor (EphR). Illustrative EPO receptors include, but are not limited to, an EPOR homodimer or an EPOR/CD131 heterodimer. Also included as an EPO receptor is beta-common receptor (βcR). Illustrative Eph receptors include, but are not limited to, EPHA1, EPHA2, EPHA3, EPHA4, EPHA5, EPHA6, EPHA7, EPHA8, EPHA9, EPHA10, EPHB1, EPHB2, EPHB3, EPHB4, EPHB5, and EPHB6. In some embodiments, the modified EPO protein comprises one or more mutations that cause the EPO protein to have reduced affinity for receptors that comprise one or more different EPO receptors or Eph receptors (e.g., heterodimer, heterotrimers, etc., including by way of non-limitation: EPOR-EPHB4, EPOR-βcR-EPOR). Also provided are the receptors of EP Patent Publication No. 2492355 the entire contents of which are hereby incorporated by reference, including by way of non-limitation, NEPORs.

[0348] The structure of the human EPO protein is predicted to comprise four-helix bundles including helices A, B, C, and D. In various embodiments, the modified EPO protein comprises one or more mutations located in four regions of the EPO protein which are important for bioactivity, i.e., amino acid residues 10-20, 44-51, 96-108, and 142-156. In some embodiments, the one or more mutations are located at residues 11-15, 44-51, 100-108, and 147-151. These residues are localized to helix A (Val11, Arg14, and Tyr15), helix C (Ser100, Arg103, Ser104, and Leu108), helix D (Asn147, Arg150, Gly151, and Leu155), and the NB connecting loop (residues 42-51). In some embodiments, the modified EPO protein comprises mutations in residues between amino acids 41-52 and amino acids 147, 150, 151, and 155. Without wishing to be bound by theory, it is believed that mutations of these residues have substantial effects on both receptor binding and in vitro biological activity. In some embodiments, the modified EPO protein comprises mutations at residues 11, 14, 15, 100, 103, 104, and 108. Without wishing to be bound by theory, it is believed that mutations of these residues have modest effects on receptor binding activity and much greater effects on in vitro biological activity. Illustrative substitutions include, but are not limited to, one or more of Val11Ser, Arg14Ala, Arg14Gln, Tyr15Ile, Pro42Asn, Thr44Ile, Lys45Asp, Va146Ala, Tyr51Phe, Ser100Glu, Ser100Thr, Arg103Ala, Ser104Ile, Ser104Ala, Leu108Lys, Asn147Lys, Arg150Ala, Gly151Ala, and Leu155Ala.

[0349] In some embodiments, the modified EPO protein comprises mutations that effect bioactivity and not binding, e.g., those listed in Eliot, et al. Mapping of the Active Site of Recombinant Human Erythropoietin Jan. 15, 1997; Blood: 89 (2), the entire contents of which are hereby incorporated by reference.

[0350] In some embodiments, the modified EPO protein comprises one or more mutations involving surface residues of the EPO protein that are involved in receptor contact. Without wishing to be bound by theory, it is believed that mutations of these surface residues are less likely to affect protein folding thereby retaining some biological activity. Illustrative surface residues that may be mutated include, but are not limited to, residues 147 and 150. In illustrative embodiments, the mutations are substitutions including, one or more of N147A, N147K, R150A and R150E.

[0351] In some embodiments, the modified EPO protein comprises one or more mutations at residues N59, E62, L67, and L70, and one or more mutations that affect disulfide bond formation. Without wishing to be bound by theory, it is believed that these mutations affect folding and/or are predicted be in buried positions and thus affects biological activity indirectly.

[0352] In an embodiment, the modified EPO protein comprises a K20E substitution that significantly reduces receptor binding. See Elliott, et al., (1997) Blood, 89:493-502, the entire contents of which are hereby incorporated by reference.

[0353] Additional EPO mutations that may be incorporated into the chimeric EPO protein of the invention are disclosed in, for example, Elliott, et al., (1997) Blood, 89:493-502, the entire contents of which are hereby incorporated by reference and Taylor et al., (2010) PEDS, 23(4): 251-260, the entire contents of which are hereby incorporated by reference.

[0354] In one embodiment, the present chimeric protein or Fc-based chimeric protein complex has (i) a targeting moiety against FAP and (ii) a targeting moiety which is directed against a tumor cell, along with any of the wildtype or modified or mutant signaling agents described herein. In an embodiment, the present chimeric protein or Fc-based chimeric protein complex has a targeting moiety directed against FAP on dendritic cells and a second targeting moiety directed against PD-L1 or PD-L2 on tumor cells.

[0355] In one embodiment, the present chimeric protein or Fc-based chimeric protein complex has (i) a targeting moiety against FAP and (ii) a targeting moiety which is directed against a checkpoint inhibitor marker, along with any of the wildtype or modified or mutant interferons described herein. In an embodiment, the present chimeric protein or Fc-based chimeric protein complex has a targeting moiety directed against FAP on dendritic cells and a second targeting moiety directed against PD-1.

[0356] In some embodiments, the signaling agent is a toxin or toxic enzyme. In some embodiments, the toxin or toxic enzyme is derived from plants and bacteria. Illustrative toxins or toxic enzymes include, but are not limited to, the diphtheria toxin, Pseudomonas toxin, anthrax toxin, ribosome-inactivating proteins (RIPs) such as ricin and saporin, modeccin, abrin, gelonin, and poke weed antiviral protein. Additional toxins include those disclosed in Mathew et al., (2009) Cancer Sci 100(8): 1359-65, the entire disclosures are hereby incorporated by reference. In such embodiments, the chimeric proteins or Fc-based chimeric protein complex of the present technology may be utilized to induce cell death in cell-type specific manner. In such embodiments, the toxin may be modified, e.g. mutated, to reduce affinity and/or activity of the toxin for an attenuated effect, as described with other signaling agents herein.

[0357] Fc Domains

[0358] The fragment crystallizable domain (Fc domain) is the tail region of an antibody that interacts with Fc receptors located on the cell surface of cells that are involved in the immune system, e.g., B lymphocytes, dendritic cells, natural killer cells, macrophages, neutrophils, eosinophils, basophils, and mast cells. In IgG, IgA and IgD antibody isotypes, the Fc domain is composed of two identical protein fragments, derived from the second and third constant domains of the antibody's two heavy chains. In IgM and IgE antibody isotypes, the Fc domain contains three heavy chain constant domains (CH domains 2-4) in each polypeptide chain. In some embodiments, the Fc-based chimeric protein of complex the present technology includes a Fc domain. In some embodiments, the Fc domains are from selected from IgG, IgA, IgD, IgM or IgE. In some embodiments, the Fc domains are from selected from IgG1, IgG2, IgG3, or IgG4.

[0359] In some embodiments, the Fc domains are from selected from human IgG, IgA, IgD, IgM or IgE. In some embodiments, the Fc domains are from selected from human IgG1, IgG2, IgG3, or IgG4.

[0360] In some embodiments, the Fc domains of the Fc-based chimeric protein complex comprise the CH2 and CH3 regions of IgG. In some embodiments, the IgG is human IgG. In some embodiments, the human IgG is selected from IgG1, IgG2, IgG3, or IgG4.

[0361] In some embodiments, the Fc domains comprise one or more mutations. In some embodiments, the mutation(s) to the Fc domains reduces or eliminates the effector function the Fc domains. In some embodiments, the mutated Fc domain has reduced affinity or binding to a target receptor. By way of example, in some embodiments, the mutation to the Fc domains reduces or eliminates the binding of the Fc domains to FcγR. In some embodiments, the FcγR is selected from FcγRI; FcγRIIa, 131 R/R; FcγRIIa, 131 H/H, FcγRIIb; and FcγRIII. In some embodiments, the mutation to the Fc domains reduces or eliminates binding to complement proteins, such as, e.g., C1q. In some embodiments, the mutation to the Fc domains reduces or eliminated binding to both FcyR and complement proteins, such as, e.g., C1q.

[0362] In some embodiments, the Fc domains comprise the LALA mutation to reduce or eliminate the effector function of the Fc domains. By way of example, in some embodiments, the LALA mutation comprises L234A and L235A substitutions in human IgG (e.g., IgG1) (wherein the numbering is based on the commonly used numbering of the CH2 residues for human IgG1 according to EU convention (PNAS, Edelman et al., 1969; 63 (1) 78-85)).

[0363] In some embodiments, the Fc domains of human IgG comprise a mutation at one or more of L234, L235, K322, D265, P329, and P331 to reduce or eliminate the effector function of the Fc domains. By way of example, in some embodiments, the mutations are selected from L234A, L234F, L235A, L235E, L235Q, K322A, K322Q, D265A, P329G, P329A, P331G, and P331S.

[0364] In some embodiments, the Fc domains comprise the FALA mutation to reduce or eliminate the effector function of the Fc domains. By way of example, in some embodiments, the FALA mutation comprises F234A and L235A substitutions in human IgG4.

[0365] In some embodiments, the Fc domains of human IgG4 comprise a mutation at one or more of F234, L235, K322, D265, and P329 to reduce or eliminate the effector function of the Fc domains. By way of example, in some embodiments, the mutations are selected from F234A, L235A, L235E, L235Q, K322A, K322Q, D265A, P329G, and P329A.

[0366] In some embodiments, the mutation(s) to the Fc domain stabilize a hinge region in the Fc domain. By way of example, in some embodiments, the Fc domain comprises a mutation at S228 of human IgG to stabilize a hinge region. In some embodiments, the mutation is S228P.

[0367] In some embodiments, the mutation(s) to the Fc domain promote chain pairing of the Fc domain. In some embodiments, chain pairing is promoted by ionic pairing (a/k/a charged pairs, ionic bond, or charged residue pair).

[0368] In some embodiments, the Fc domain comprises a mutation at one more of the following amino acid residues of IgG to promote of ionic pairing: D356, E357, L368, K370, K392, D399, and K409.

[0369] By way of example, in some embodiments, the human IgG Fc domain comprise one of the mutation combinations in Table 1 to promote of ionic pairing.

TABLE 1

| Substitution(s) | Substitution(s) |
|---|---|
| on one Fc Chain | on other Fc Chain |
| D356K D399K | K392D K409D |
| E357R L368R | K370D K409D |
| E357R L368K | K370D K409D |
| E357R D399K | K370D K409D |
| E357R | K370D |
| L368R D399K | K392D K409D |
| L368K D399K | K392D K409D |
| L368R D399K | K409D |
| L368K D399K | K409D |
| L368R | K409D |
| L368K | K409D |
| K370D K409D | E357R D399K |
| K370D K409D | E357R L368R |
| K370D K409D | E357R L368K |
| K370D K409D | E357R D399K |
| K370D K409D | E357R L368R |
| K370D K409D | E357R L368K |
| K370D | E357R |
| K370D | E357R |
| K392D K409D | D356K D399K |
| K392D K409D | L368R D399K |
| K392D K409D | L368K D399K |
| K392D K409D | D399K |
| D399K | K392D K409D |
| D399K | K409D |
| K409D | L368R |
| K409D | L368K |
| K409D | L368R D399K |
| K409D | L368K D399K |
| K409D | L368R |
| K409D | L368K |
| K409D | L368R D399K |
| K409D | L368K D399K |
| K409D | D399K |

[0370] In some embodiments, chain pairing is promoted by a knob-in-hole mutations. In some embodiments, the Fc domain comprises one or more mutations to allow for a knob-in-hole interaction in the Fc domain. In some embodiments, a first Fc chain is engineered to express the “knob” and a second Fc chain is engineered to express the complementary “hole.” By way of example, in some embodiments, human IgG Fc domain comprises the mutations of Table 2 to allow for a knob-in-hole interaction.

TABLE 2

| Substitution(s) | Substitution(s) |
|---|---|
| on one Fc Chain | on other Fc Chain |
| T366Y | Y407T |
| T366Y/F405A | T394W/Y407T |
| T366W | Y407A |
| T366W | Y407V |
| T366Y | Y407A |
| T366Y | Y407V |
| T366Y | Y407T |

[0371] In some embodiments, the Fc domains in the Fc-based chimeric protein complexes of the present technology comprise any combination of the above-disclosed mutations. By way of example, in some embodiments, the Fc domain comprises mutations that promote ionic pairing and/or a knob-in-hole interaction. By way of example, in some embodiments, the Fc domain comprises mutations that have one or more of the following properties: promote ionic pairing, induce a knob-in-hole interaction, reduce or eliminate the effector function of the Fc domain, and cause Fc stabilization (e.g. at hinge).

[0372] By way of example, in some embodiments, a human IgG Fc domains comprise mutations disclosed in Table 3, which promote ionic pairing and/or promote a knob-in-hole interaction in the Fc domain.

TABLE 3

| Substitution(s) | Substitution(s) |
|---|---|
| on one Fc Chain | on other Fc Chain |
| T366W K370D | E357R Y407A |
| T366W K370D | E357R Y407V |
| T366W K409D | L368R Y407A |
| T366W K409D | L368R Y407V |
| T366W K409D | L368K Y407A |
| T366W K409D | L368K Y407V |
| T366W K409D | L368R D399K Y407A |
| T366W K409D | L368R D399K Y407V |
| T366W K409D | L368K D399K Y407A |
| T366W K409D | L368K D399K Y407V |
| T366W K409D | D399K Y407A |
| T366W K409D | D399K Y407V |
| T366W K392D K409D | D399K Y407A |
| T366W K392D K409D | D399K Y407V |
| T366W K392D K409D | D356K D399K Y407A |
| T366W K392D K409D | D356K D399K Y407V |
| T366W K370D K409D | E357R D399K Y407A |
| T366W K370D K409D | E357R D399K Y407V |
| T366W K370D K409D | E357R L368R Y407A |
| T366W K370D K409D | E357R L368R Y407V |
| T366W K370D K409D | E357R L368K Y407A |
| T366W K370D K409D | E357R L368K Y407V |
| T366W K392D K409D | L368R D399K Y407A |
| T366W K392D K409D | L368R D399K Y407V |
| T366W K392D K409D | L368K D399K Y407A |
| T366W K392D K409D | L368K D399K Y407V |
| E357R T366W | K370D Y407A |
| E357R T366W | K370D Y407V |
| T366W L368R | Y407A K409D |
| T366W L368R | Y407V K409D |
| T366W L368K | Y407A K409D |
| T366W L368K | Y407V K409D |
| T366W L368R D399K | Y407A K409D |
| T366W L368R D399K | Y407V K409D |
| T366W L368K D399K | Y407A K409D |
| T366W L368K D399K | Y407V K409D |
| T366W D399K | Y407A K409D |
| T366W D399K | Y407V K409D |
| 1366W D399K | K392D Y407A K409D |
| T366W D399K | K392D Y407V K409D |
| T366W D356K D399K | K392D Y407A K409D |
| T366W D356K D399K | K392D Y407V K409D |
| E357R T366W D399K | K370D Y407A K409D |
| E357R T366W D399K | K370D Y407V K409D |
| E357R T366W L368R | K370D Y407A K409D |
| E357R T366W L368R | K370D Y407V K409D |
| E357R T366W L368K | K370D Y407A K409D |
| E357R T366W L368K | K370D Y407V K409D |
| T366W L368R D399K | K392D Y407A K409D |
| T366W L368R D399K | K392D Y407V K409D |
| T366W L368K D399K | K392D Y407A K409D |

[0373] By way of example, in some embodiments, a human IgG Fc domains comprise mutations disclosed in Table 4, which promote ionic pairing, promote a knob-in-hole interaction, or a combination thereof in the Fc domain. In embodiments, the “Chain 1” and “Chain 2” of Table 4 can be interchanged (e.g. Chain 1 can have Y407T and Chain 2 can have T366Y).

TABLE 4

| Chain 1 mutation | Chain 2 mutation | Reference | IgG |
|---|---|---|---|
| T366Y | Y407T | Ridgway et al., 1996 Protein Engineering, | IgG1 |
| | | Design and Selection, Volume 9, Issue 7, 1 | |
| | | Jul. 1996, Pages 617-62 | |
| T366Y/F405A | T394W/Y407T | Ridgway et al., 1996 Protein Engineering, | IgG1 |
| | | Design and Selection, Volume 9, Issue 7, 1 | |
| | | Jul. 1996, Pages 617-62 | |
| T366W | Y407A | Atwell et al., 1997 JMB | IgG1 |
| | | Volume 270, Issue 1, 4 Jul. 1997, Pages | |
| | | 26-35 | |
| T366W | T366S/L368V/Y407A | Atwell et al., 1997 JMB | IgG1 |
| | | Volume 270, Issue 1, 4 Jul. 1997, Pages | |
| | | 26-35 | |
| T366W | L368A/Y407A | Atwell et al., 1997 JMB | IgG1 |
| | | Volume 270, Issue 1, 4 Jul. 1997, Pages | |
| | | 26-35 | |
| T366W | T366S/L368A/Y407A | Atwell et al., 1997 JMB | IgG1 |
| | | Volume 270, Issue 1, 4 Jul. 1997, Pages | |
| | | 26-35 | |
| T366W | T366S/L368G/Y407V | Atwell et al., 1997 JMB | IgG1 |
| | | Volume 270, Issue 1, 4 Jul. 1997, Pages | |
| | | 26-35 | |
| T366W/D399C | T366S/L368A/ | Merchant et al., 1998 Nature Biotechnology | IgG1 |
| | K392C/Y407V | volume 16, pages 677-681 (1998) | |
| T366W/K392C | T366S/L368A/ | Merchant et al., 1998 Nature Biotechnology | IgG1 |
| | D399C/Y407V | volume 16, pages 677-681 (1998) | |
| S354C/T366W | Y349C/T366S/ | Merchant et al., 1998 Nature Biotechnology | IgG1 |
| | L368A/Y407V | volume 16, pages 677-681 (1998) | |
| Y349C/T366W | S354C/T366S/ | Merchant et al., 1998 Nature Biotechnology | IgG1 |
| | L368A/Y407V | volume 16, pages 677-681 (1998) | |
| E356C/T366W | Y349C/T366S/ | Merchant et al., 1998 Nature Biotechnology | IgG1 |
| | L368A/Y407V | volume 16, pages 677-681 (1998) | |
| Y349C/T366W | E356C/T366S/ | Merchant et al., 1998 Nature Biotechnology | IgG1 |
| | L368A/Y407V | volume 16, pages 677-681 (1998) | |
| E357C/T366W | Y349C/T366S/ | Merchant et al., 1998 Nature Biotechnology | IgG1 |
| | L368A/Y407V | volume 16, pages 677-681 (1998) | |
| Y349C/T366W | E357C/T366S/ | Merchant et al., 1998 Nature Biotechnology | IgG1 |
| | L368A/Y407V | volume 16, pages 677-681 (1998) | |
| D339R | K409E | Gunasekaran et al., 2010 The Journal of | IgG1 |
| | | Biological Chemistry 285, 19637-19646. | |
| D339K | K409E | Gunasekaran et al., 2010 The Journal of | IgG1 |
| | | Biological Chemistry 285, 19637-19646. | |
| D339R | K409D | Gunasekaran et al., 2010 The Journal of | IgG1 |
| | | Biological Chemistry 285, 19637-19646. | |
| D339K | K409D | Gunasekaran et al., 2010 The Journal of | IgG1 |
| | | Biological Chemistry 285, 19637-19646. | |
| D339K | K360D/K409E | Gunasekaran et al., 2010 The Journal of | IgG1 |
| | | Biological Chemistry 285, 19637-19646. | |
| D339K | K392D/K409E | Gunasekaran et al., 2010 The Journal of | IgG1 |
| | | Biological Chemistry 285, 19637-19646. | |
| D339K/E356K | K392D/K409E | Gunasekaran et al., 2010 The Journal of | IgG1 |
| | | Biological Chemistry 285, 19637-19646. | |
| D339K/E357K | K392D/K409E | Gunasekaran et al., 2010 The Journal of | IgG1 |
| | | Biological Chemistry 285, 19637-19646. | |
| D339K/E356K | K409E/K439D | Gunasekaran et al., 2010 The Journal of | IgG1 |
| | | Biological Chemistry 285, 19637-19646. | |
| D339K/E357K | K370D/K409E | Gunasekaran et al., 2010 The Journal of | IgG1 |
| | | Biological Chemistry 285, 19637-19646. | |
| D339K/E356K/E357K | K370D/K392D/K409E | Gunasekaran et al., 2010 The Journal of | IgG1 |
| | | Biological Chemistry 285, 19637-19646. | |
| S364H/F405A | Y349T/T394F | Moore et al., 2011 mAbs, 3:6, 546-557 | IgG1 |
| S364H/T394F | Y349T/F405A | Moore et al., 2011 mAbs, 3:6, 546-557 | IgG1 |
| D221R/P228R/K409R | D221E/P228E/L368E | Strop et al., 2012 JMB Volume 420, Issue 3, | IgG1 |
| | | 13 Jul. 2012, Pages 204-219 | |
| C223R/E225R/ | C223E/P228E/L368E | Strop et al., 2012 JMB Volume 420, Issue 3, | IgG2 |
| P228R/K409R | | 13 Jul. 2012, Pages 204-219 | |
| F405L | K409R | Labrijn et al., 2013 PNAS Mar. 26, 2013. | IgG1 |
| | | 110 (13) 5145-5150 | |
| F405A/Y407V | T394W | Von Kreudenstein et al., 2013 mAbs | IgG1 |
| | | Volume 5, 2013 - Issue 5, pp.644-654 | |
| F405A/Y407V | T366I/T394W | Von Kreudenstein et al., 2013 mAbs | IgG1 |
| | | Volume 5, 2013 - Issue 5, pp.644-654 | |
| F405A/Y407V | T366L/T394W | Von Kreudenstein et al., 2013 mAbs | IgG1 |
| | | Volume 5, 2013 - Issue 5, pp.644-654 | |
| F405A/Y407V | T366L/K392M/T394W | Von Kreudenstein et al., 2013 mAbs | IgG1 |
| | | Volume 5, 2013 - Issue 5, pp.644-654 | |
| L351Y/F405A/Y407V | T366L/K392M/T394W | Von Kreudenstein et al., 2013 mAbs | IgG1 |
| | | Volume 5, 2013 - Issue 5, pp.644-654 | |
| T350V/L351Y/ | T350V/T366L/ | Von Kreudenstein et al., 2013 mAbs | IgG1 |
| F405A/Y407V | K392M/T394W | Volume 5, 2013 - Issue 5, pp.644-654 | |
| T350V/L351Y/ | T350V/T366L/ | Von Kreudenstein et al., 2013 mAbs | IgG1 |
| F405A/Y407V | K392L/T394W | Volume 5, 2013 - Issue 5, pp.644-654 | |
| K409W | D339V/F405T | Choi et al., 2013 PNAS Jan. 2, 2013. | IgG1 |
| | | 110 (1) 270-275 | |
| K360E | Q347R | Choi et al., 2013 PNAS Jan. 2, 2013. | IgG1 |
| | | 110 (1) 270-275 | |
| K360E/K409W | D339V/Q347R/F405T | Choi et al., 2013 PNAS Jan. 2, 2013. | IgG1 |
| | | 110 (1) 270-275 | |
| Y349C/K360E/K409W | D339V/Q347R/ | Choi et al., 2013 PNAS Jan. 2, 2013. | IgG1 |
| | S354C/F405T | 110 (1) 270-275 | |
| K392A/K409D | E356K/D399K | Leaver-Fey et al., 2016 Structure Volume | IgG1 |
| | | 24, Issue 4, 5 Apr. 2016, Pages 641-651 | |
| T366W | T366S/L358A/Y407A | Leaver-Fey et al., 2016 Structure Volume | IgG1 |
| | | 24, Issue 4, 5 Apr. 2016, Pages 641-651 | |
| D339M/Y407A | T336V/K409V | Leaver-Fey et al., 2016 Structure Volume | IgG1 |
| | | 24, Issue 4, 5 Apr. 2016, Pages 641-651 | |
| D339M/K360D/Y407A | T336V/E345R/ | Leaver-Fey et al., 2016 Structure Volume | IgG1 |
| | Q347R/K409V | 24, Issue 4, 5 Apr. 2016, Pages 641-651 | |
| Y349S/T366V/ | E357D/S364Q/Y407A | Leaver-Fey et al., 2016 Structure Volume | IgG1 |
| K370Y/K409V | | 24, Issue 4, 5 Apr. 2016, Pages 641-651 | |
| Y349S/T366M/ | E356G/E357D/ | Leaver-Fey et al., 2016 Structure Volume | IgG1 |
| K370Y/K409V | S364Q/Y407A | 24, Issue 4, 5 Apr. 2016, Pages 641-651 | |
| Y349S/T366M/ | E357D/S364R/Y407A | Leaver-Fey et al., 2016 Structure Volume | IgG1 |
| K370Y/K409V | | 24, Issue 4, 5 Apr. 2016, Pages 641-651 | |

And any combination as described in Tables 1-3 of US20150284475A1

[0374] By way of example, in some embodiments, a human IgG Fc domain comprises mutations disclosed in Table 5, which reduce or eliminate FcγR and/or complement binding in the Fc domain. In embodiments, the Table 5 mutations are in both chains.

TABLE 5

| Chain 1 mutation | Reference | IgG |
|---|---|---|
| L234A/L235A | Alegre et al., 1994 | IgG1 |
| | Transplantation 57:1537-1543 | |
| F234A/L235A | Alegre et al., 1994 | IgG4 |
| | Transplantation 57:1537-1543 | |
| L235E | Morgan et al., 1995 | IgG1 |
| | Immunology. 1995 Oct; 86(2): | |
| | 319-324. | |
| L235E | Morgan et al., 1995 | IgG4 |
| | Immunology. 1995 Oct; 86(2): | |
| | 319-324. | |
| L235A | Morgan et al., 1995 | IgG1 |
| | Immunology. 1995 Oct; 86(2): | |
| | 319-324. | |
| G237A | Morgan et al., 1995 | IgG1 |
| | Immunology. 1995 Oct; 86(2): | |
| | 319-324. | |
| N297H | Tao and Morrison, | IgG1 |
| | J. Immunol. 1989; 143:2595- | |
| | 2601 | |
| N297Q | Tao and Morrison, | IgG1 |
| | J. Immunol. 1989; 143:2595- | |
| | 2601 | |
| N297K | Tao and Morrison, | IgG3 |
| | J. Immunol. 1989; 143:2595- | |
| | 2601 | |
| N297Q | Tao and Morrison, | IgG3 |
| | J. Immunol. 1989; 143:2595- | |
| | 2601 | |
| D265A | Idusogie et al., 2000 J Immunol | IgG1 |
| | Apr. 15, 2000, 164 (8) 4178- | |
| | 4184 | |
| D270A, V, K | Idusogie et al., 2000 J Immunol | IgG1 |
| | Apr. 15, 2000, 164 (8) 4178- | |
| | 4184 | |
| K322A, L, M, D, E | Idusogie et al., 2000 J Immunol | IgG1 |
| | Apr. 15, 2000, 164 (8) 4178- | |
| | 4184 | |
| P329A, X | Idusogie et al., 2000 J Immunol | IgG1 |
| | Apr. 15, 2000, 164 (8) 4178- | |
| | 4184 | |
| P331A, S, G, X | Idusogie et al., 2000 J Immunol | IgG1 |
| | Apr. 15, 2000, 164 (8) 4178- | |
| | 4184 | |
| D265A | Idusogie et al., 2000 J Immunol | IgG1 |
| | Apr. 15, 2000, 164 (8) 4178- | |
| | 4184 | |
| L234A | Hezareh et al., 2001 J. Virol. | IgG1 |
| | December 2001 vol. 75 no. 24 | |
| | 12161-12168 | |
| L234A/L235A | Hezareh et al., 2001 J. Virol. | IgG1 |
| | December 2001 vol. 75 no. 24 | |
| | 12161-12168 | |
| L234F/L235E/P331S | Oganesyan et al., 2008 Acta | IgG1 |
| | Cryst. (2008). D64, 700-704 | |
| H268Q/V309L/A330S/P331S | An et al., 2009 mAbs | IgG1 |
| | Volume 1, 2009 - Issue 6, pp. | |
| | 572-579 | |
| G236R/L328R | Moore et al., 2011 mAbs | IgG1 |
| | Volume 3, 2011 - Issue 6, pp. | |
| | 546-557 | |
| N297G | Couch et al., 2013 Sci. Transl. | IgG1 |
| | Med., 5 (2013) | |
| | 183ra57, 1-12 | |
| N297G/D265A | Couch et al., 2013 Sci. Transl. | IgG1 |
| | Med., 5 (2013) | |
| | 183ra57, 1-12 | |
| V234A/G237A/P328S/H268A/ | Vafa et al., 2014 Methods | IgG2 |
| V309L/A330S/P331S | Volume 65, Issue 1, 1 Jan. | |
| | 2014, Pages 114-126 | |
| L234A/L235A/P329G | Lo et al., 2016 The Journal of | IgG1 |
| | Biological Chemistry | |
| | 292, 3900-3908 | |
| N297D | Schlothauer et al., 2016 Protein | IgG1 |
| | Engineering, Design and | |
| | Selection, Volume 29, Issue 10, | |
| | 1 Oct. 2016, Pages 457- | |
| | 466 | |
| S228P/L235E | Schlothauer et al., 2016 Protein | IgG4 |
| | Engineering, Design and | |
| | Selection, Volume 29, Issue 10, | |
| | 1 Oct. 2016, Pages 457- | |
| | 466 | |
| S228P/L235E/P329G | Schlothauer et al., 2016 Protein | IgG4 |
| | Engineering, Design and | |
| | Selection, Volume 29, Issue 10, | |
| | 1 Oct. 2016, Pages 457- | |
| | 466 | |
| L234F/L235A/K322Q | Borrok et al., 2017 J Pharm Sci | IgG1 |
| | April 2017 Volume 106, Issue | |
| | 4, Pages 1008-1017 | |
| L234F/L235Q/P331G | Borrok et al., 2017 J Pharm Sci | IgG1 |
| | April 2017 Volume 106, Issue | |
| | 4, Pages 1008-1017 | |
| L234F/L235Q/K322Q | Borrok et al., 2017 J Pharm Sci | IgG1 |
| | April 2017 Volume 106, Issue | |
| | 4, Pages 1008-1017 | |
| L234A/L235A/G237A/P328S/ | Tam et al., 2017 Open Access | IgG1 |
| H268A/A330S/P331S | Antibodies 2017, 6(3), 12; | |
| | doi:10.3390/antib6030012 | |
| S228P/F234A/L235A | Tam et al., 2017 Open Access | IgG4 |
| | Antibodies 2017, 6(3), 12; | |
| | doi:10.3390/antib6030012 | |
| S228P/F234A/ | Tam et al., 2017 Open Access | IgG4 |
| L235A/G237A/P238S | Antibodies 2017, 6(3), 12; | |
| | doi:10.3390/antib6030012 | |
| S228P/F234A/L235A/ | Tam et al., 2017 Open Access | IgG4 |
| G236/G237A/P238S | Antibodies 2017, 6(3), 12; | |
| | doi:10.3390/antib6030012 | |

[0375] In some embodiments, the Fc domains in the Fc-based chimeric protein complexes of the present technology are homodimeric, i.e., the Fc domain in the chimeric protein complex comprises two identical protein fragments. In some embodiments, the Fc domains in the Fc-based chimeric protein complexes of the present technology are heterodimeric, i.e., the Fc domain comprises two non-identical protein fragments.

[0376] In some embodiments, heterodimeric Fc domains are engineered using ionic pairing and/or knob-in-hole mutations orientation/configuration. In a trans orientation/configuration, the targeting moiety and signaling agent are, in embodiments, not found on the same polypeptide chain in the present Fc-based chimeric protein complexes. In some embodiments, heterodimeric Fc domains are engineered using ionic pairing and/or knob-in-hole mutations described herein. In some embodiments, the heterodimeric Fc-based chimeric protein complexes have a trans orientation.

[0377] In a trans orientation, the targeting moiety and signaling agent are, in embodiments, not found on the same polypeptide chain in the present Fc-based chimeric protein complexes. In a trans orientation, the targeting moiety and signaling agent are, in embodiments, found on separate polypeptide chains in the Fc-based chimeric protein complexes. In a cis orientation, the targeting moiety and signaling agent are, in embodiments, found on the same polypeptide chain in the Fc-based chimeric protein complexes.

[0378] In some embodiments, where more than one targeting moiety is present in the heterodimeric protein complexes described herein, one targeting moiety may be in trans orientation (relative to the signaling agent), whereas another targeting moiety may be in cis orientation (relative to the signaling agent). In some embodiments, the signaling agent and target moiety are on the same ends/sides (N-terminal or C-terminal ends) of an Fc domain. In some embodiments, the signaling agent and targeting moiety are on different sides/ends of a Fc domain (N-terminal and C-terminal ends).

[0379] In some embodiments, where more than one targeting moiety is present in the heterodimeric protein complexes described herein, the targeting moieties may be found on the same Fc chain or on two different Fc chains in the heterodimeric protein complex (in the latter case the targeting moieties would be in trans relative to each other, as they are on different Fc chains). In some embodiments, where more than one targeting moiety is present on the same Fc chain, the targeting moieties may be on the same or different sides/ends of a Fc chain (N-terminal or/and C-terminal ends).

[0380] In some embodiments, where more than one signaling agent is present in the heterodimeric protein complexes described herein, the signaling agents may be found on the same Fc chain or on two different Fc chains in the heterodimeric protein complex (in the latter case the signaling agents would be in trans relative to each other, as they are on different Fc chains). In some embodiments, where more than one signaling agent is present on the same Fc chain, the signaling agents may be on the same or different sides/ends of a Fc chain (N-terminal or/and C-terminal ends).

[0381] In some embodiments, where more than one signaling agent is present in the heterodimeric protein complexes described herein, one signaling agent may be in trans orientation (as relates to the targeting moiety), whereas another signaling agent may be in cis orientation (as relates to the targeting moiety).

[0382] In some embodiments, the Fc domains includes or starts with the core hinge region of wild-type human IgG1, which contains the sequence Cys-Pro-Pro-Cys. In some embodiments, the Fc domains also include the upper hinge, or parts thereof (e.g., DKTHTCPPC; see WO 2009053368), EPKSCDKTHTCPPC, or EPKSSDKTHTCPPC; see Lo et al., Protein Engineering vol. 11 no. 6 pp. 495-500, 1998)).

[0383] Fc-Based Chimeric Protein Complexes

[0384] The Fc-based chimeric protein complexes of the present technology comprise at least one Fc domain disclosed herein, at least one signaling agent (SA) disclosed herein, and at least one targeting moiety (TM) disclosed herein.

[0385] The present Fc-based chimeric protein complexes may encompass a complex of two fusion proteins, each comprising an Fc domain. In some embodiments, the Fc-based chimeric protein complex is homodimeric.

[0386] In some embodiments, the Fc-based chimeric protein complex is heterodimeric. In some embodiments, the heterodimeric Fc-based chimeric protein complex has a trans orientation/configuration. In some embodiments, the heterodimeric Fc-based chimeric protein complex has a cis orientation/configuration. In some embodiments, the heterodimeric Fc-based chimeric protein complex does not comprise the signaling agent and targeting moiety on a single polypeptide.

[0387] In some embodiments, the Fc-based chimeric protein has an improved in vivo half-life relative to a chimeric protein lacking an Fc or a chimeric protein that is not a heterodimeric complex. In some embodiments, the Fc-based chimeric protein has an improved solubility, stability and other pharmacological properties relative to a chimeric protein lacking an Fc or a chimeric protein, which is not a heterodimeric complex.

[0388] Heterodimeric Fc-based chimeric protein complexes are composed of two different polypeptides. In embodiments described herein, the targeting domain is on a different polypeptide than the signaling agent and accordingly, proteins that contain only one targeting domain copy, and also only one signaling agent copy can be made (this provides a configuration in which potential interference with desired properties can be controlled). Further, in embodiments, one targeting domain (e.g. VHH) only can avoid cross-linking of the antigen on the cell surface (which could elicit undesired effects in some cases) Further, in embodiments, one signaling agent may alleviate molecular “crowding” and potential interference with avidity mediated restoration of effector function in dependence of the targeting domain. Further, in embodiments, heterodimeric Fc-based chimeric protein complexes can have two targeting moieties and these can be placed on the two different polypeptides. For instance, in embodiments, the C-terminus of both targeting moieties (e.g. VHHs) can be masked to avoid potential autoantibodies or pre-existing antibodies (e.g. VHH autoantibodies or pre-existing antibodies). Further, in embodiments, heterodimeric Fc-based chimeric protein complexes, e.g. with the targeting domain on a different polypeptide than the signaling agent (e.g. wild type signaling agent), may favor “cross-linking” of two cell types (e.g. a tumor cell and an immune cell). Further, in embodiments, heterodimeric Fc-based chimeric protein complexes can have two signaling agents, each on different polypeptides to allow more complex effector responses.

[0389] Further, in embodiments, heterodimeric Fc-based chimeric protein complexes, e.g. with the targeting domain on a different polypeptide than the signaling agent, combinatorial diversity of targeting moiety and signaling agent is provided in a practical manner. For instance, in embodiments, polypeptides with any of the targeting moieties described herein can be combined “off the shelf” with polypeptides with any of the signaling agents described herein to allow rapid generation of various combinations of targeting moieties and signaling agents in single Fc-based chimeric protein complexes.

[0390] In some embodiments, the Fc-based chimeric protein complex comprises one or more linkers. In some embodiments, the Fc-based chimeric protein complex includes a linker that connects the Fc domain, signaling agent(s) and targeting moiety(ies). In some embodiments, the Fc-based chimeric protein complex includes a linker that connects each signaling agent and targeting moiety (or, if more than one targeting moiety, a signaling agent to one of the targeting moieties). In some embodiments, the Fc-based chimeric protein complex includes a linker that connects each signaling agent to the Fc domain. In some embodiments, the Fc-based chimeric protein complex includes a linker that connects each targeting moiety to the Fc domain. In some embodiments, the Fc-based chimeric protein complex includes a linker that connects a targeting moiety to another targeting moiety. In some embodiments, the Fc-based chimeric protein complex includes a linker that connects a signaling agent to another signaling agent.

[0391] In some embodiments, a Fc-based chimeric protein complex comprises two or more targeting moieties. In such embodiments, the targeting moieties can be the same targeting moiety or they can be different targeting moieties.

[0392] In some embodiments, a Fc-based chimeric protein complex comprises two or more signaling agents. In such embodiments, the signaling agents can be the same targeting moiety or they can be different targeting moieties.

[0393] By way of example, in some embodiments, the Fc-based chimeric protein complex comprise a Fc domain, at least two signaling agents (SA), and at least two targeting moieties (TM), wherein the Fc domain, signaling agents, and targeting moieties are selected from any of the Fc domains, signaling agents, and targeting moieties disclosed herein. In some embodiments, the Fc domain is homodimeric.

[0394] In various embodiments, the Fc-based chimeric protein complex takes the form of any of the schematics of FIGS. 5A-F. In various embodiments, the Fc-based chimeric protein complex takes the form of any of the schematics of FIGS. 6A-H. In various embodiments, the Fc-based chimeric protein complex takes the form of any of the schematics of FIGS. 7A-H. In various embodiments, the Fc-based chimeric protein complex takes the form of any of the schematics of FIGS. 8A-D. In various embodiments, the Fc-based chimeric protein complex takes the form of any of the schematics of FIGS. 9A-F. In various embodiments, the Fc-based chimeric protein complex takes the form of any of the schematics of FIGS. 10A-J. In various embodiments, the Fc-based chimeric protein complex takes the form of any of the schematics of FIGS. 11A-D. In various embodiments, the Fc-based chimeric protein complex takes the form of any of the schematics of FIGS. 12A-F. In various embodiments, the Fc-based chimeric protein complex takes the form of any of the schematics of FIGS. 13A-J. In various embodiments, the Fc-based chimeric protein complex takes the form of any of the schematics of FIGS. 14A-F. In various embodiments, the Fc-based chimeric protein complex takes the form of any of the schematics of FIGS. 15A-L. In various embodiments, the Fc-based chimeric protein complex takes the form of any of the schematics of FIGS. 16A-L. In various embodiments, the Fc-based chimeric protein complex takes the form of any of the schematics of FIGS. 17A-F. In various embodiments, the Fc-based chimeric protein complex takes the form of any of the schematics of FIGS. 18A-L. In various embodiments, the Fc-based chimeric protein complex takes the form of any of the schematics of FIGS. 19A-L. In various embodiments, the Fc-based chimeric protein complex takes the form of any of the schematics of FIGS. 20A-J. In various embodiments, the Fc-based chimeric protein complex takes the form of any of the schematics of FIGS. 21A-J. In various embodiments, the Fc-based chimeric protein complex takes the form of any of the schematics of FIGS. 22A-F. In various embodiments, the Fc-based chimeric protein complex takes the form of any of the schematics of FIGS. 23A-F.

[0395] In some embodiments, the signaling agents are linked to the targeting moieties and the targeting moieties are linked to the Fc domain on the same terminus (see FIGS. 5A-F). In some embodiments, the Fc domain is homodimeric.

[0396] In some embodiments, the signaling agents and targeting moieties are linked to the Fc domain, wherein the targeting moieties and signaling agents are linked on the same terminus (see FIGS. 5A-F). In some embodiments, the Fc domain is homodimeric.

[0397] In some embodiments, the targeting moieties are linked to signaling agents and the signaling agents are linked to the Fc domain on the same terminus (see FIGS. 5A-F). In some embodiments, the Fc domain is homodimeric.

[0398] In some embodiments, the homodimeric Fc-based chimeric protein complex has two or more targeting moieties. In some embodiments, there are four targeting moieties and two signaling agents, the targeting moieties are linked to the Fc domain and the signaling agents are linked to targeting moieties on the same terminus (see FIGS. 6A-H). In some embodiments, the Fc domain is homodimeric. In some embodiments, where there are four targeting moieties and two signaling agents, two targeting moieties are linked to the Fc domain and two targeting moieties are linked to the signaling agents, which are linked to the Fc domain on the same terminus (see FIGS. 6A-H). In some embodiments, the Fc domain is homodimeric. In some embodiments, where there are four targeting moieties and two signaling agents, two targeting moieties are linked to each other and one of the targeting moieties of from each pair is linked to the Fc domain on the same terminus and the signaling agents are linked to the Fc domain on the same terminus (see FIGS. 6A-H). In some embodiments, the Fc domain is homodimeric. In some embodiments, where there are four targeting moieties and two signaling agents, two targeting moieties are linked to each other, wherein one of the targeting moieties of from each pair is linked to a signaling agent and the other targeting moiety of the pair is linked the Fc domain, wherein the targeting moieties linked to the Fc domain are linked on the same terminus (see FIGS. 6A-H). In some embodiments, the Fc domain is homodimeric.

[0399] In some embodiments, the homodimeric Fc-based chimeric protein complex has two or more signaling agents. In some embodiments, where there are four signaling agents and two targeting moieties, two signaling agents are linked to each other and one of the signaling agents of from pair is linked to the Fc domain on the same terminus and the targeting moieties are linked to the Fc domain on the same terminus (see FIGS. 7A-H). In some embodiments, the Fc domain is homodimeric. In some embodiments, where there are four signaling agents and two targeting moieties, two signaling agents are linked to the Fc domain one the same terminus and two of the signaling agents are each linked to a targeting moiety, wherein the targeting moieties are linked to the Fc domain at the same terminus (see FIGS. 7A-H). In some embodiments, the Fc domain is homodimeric. In some embodiments, where there are four signaling agents and two targeting moieties, two signaling agents are linked to each other and one of the signaling agents of from pair is linked to a targeting moiety and the targeting moieties are linked to the Fc domain on the same terminus (see FIGS. 7A-H). In some embodiments, the Fc domain is homodimeric.

[0400] By way of example, in some embodiments, the Fc-based chimeric protein complex comprise a Fc domain, wherein the Fc domain comprises ionic pairing mutation(s) and/or knob-in-hole mutation(s), at least one signaling agent, and at least one targeting moiety, wherein the ionic pairing motif and/or a knob-in-hole motif, signaling agent, and targeting moiety are selected from any of the ionic pairing motif and/or a knob-in-hole motif, signaling agents, and targeting moieties disclosed herein. In some embodiments, the Fc domain is heterodimeric. In some embodiments, the Fc domain comprises a mutation that reduces or eliminates its effector function.

[0401] In some embodiments, the signaling agent is linked to the targeting moiety, which is linked to the Fc domain (see FIGS. 14A-F and 17A-F). In some embodiments, the targeting moiety is linked to the signaling agent, which is linked to the Fc domain (see FIGS. 14A-F and 17A-F). In some embodiments, the Fc domain is heterodimeric. In some embodiments, the Fc domain comprises a mutation that reduces or eliminates its effector function.

[0402] In some embodiments, the signaling agent and targeting moiety are linked to the Fc domain (see FIGS. 8A-D, 11A-D, 14A-F, and 17A-F). In some embodiments, the targeting moiety and the signaling agent are linked to different Fc chains on the same terminus (see FIGS. 8A-D and 11A-D). In some embodiments, the targeting moiety and the signaling agent are linked to different Fc chains on different termini (see FIGS. 8A-D and 11A-D). In some embodiments, the targeting moiety and the signaling agent are linked to the same Fc chain (see FIGS. 14A-F and 17A-F). In some embodiments, the Fc domain is heterodimeric. In some embodiments, the Fc domain comprises a mutation that reduces or eliminates its effector function.

[0403] In some embodiments, where there are one signaling agent and two targeting moieties, the signaling agent is linked to the Fc domain and two targeting moieties can be: 1) linked to each other with one of the targeting moieties linked to the Fc domain; or 2) each linked to the Fc domain (see FIGS. 9A-F, 12A-F, 15A-L, 18A-L, 20A-J, and 21A-J). In some embodiments, the targeting moieties are linked on one Fc chain and the signaling agent is on the other Fc chain (see FIGS. 9A-F and 12A-F). In some embodiments, the paired targeting moieties and the signaling agent are linked to the same Fc chain (see FIGS. 15A-L and 18A-L).

[0404] In some embodiments, a targeting moiety is linked to the Fc domain and the other targeting moiety is linked to the signaling agent, and the paired targeting moiety is linked to the Fc domain (see FIGS. 15A-L, 18A-L, 20A-J, and 21A-J). In some embodiments, the unpaired targeting moiety and paired targeting moiety are linked to the same Fc chain (see FIGS. 15A-L and 18A-L). In some embodiments, the unpaired targeting moiety and paired targeting moiety are linked to different Fc chains (see FIGS. 20A-J and 21A-J). In some embodiments, the unpaired targeting moiety and paired targeting moiety are linked on the same terminus (see FIGS. 20A-J and 21A-J). In some embodiments, the Fc domain is heterodimeric. In some embodiments, the Fc domain comprises a mutation that reduces or eliminates its effector function.

[0405] In some embodiments, where there are one signaling agent and two targeting moieties, a targeting moiety is linked to the signaling agent, which is linked to the Fc domain, and the unpaired targeting moiety is linked the Fc domain (see FIGS. 15A-L, 18A-L, 20A-J, and 21A-J). In some embodiments, the paired signaling agent and unpaired targeting moiety are linked to the same Fc chain (see FIGS. 15A-L and 18A-L). In some embodiments, the paired signaling agent and unpaired targeting moiety are linked to different Fc chains (see FIGS. 20A-J and 21A-J). In some embodiments, the paired signaling agent and unpaired targeting moiety are linked on the same terminus (see FIGS. 20A-J and 21A-J). In some embodiments, the Fc domain is heterodimeric. In some embodiments, the Fc domain comprises a mutation that reduces or eliminates its effector function.

[0406] In some embodiments, where there are one signaling agent and two targeting moieties, the targeting moieties are linked together and the signaling agent is linked to one of the paired targeting moieties, wherein the targeting moiety not linked to the signaling agent is linked to the Fc domain (see FIGS. 15A-L and 18A-L). In some embodiments, the Fc domain is heterodimeric. In some embodiments, the Fc domain comprises a mutation that reduces or eliminates its effector function.

[0407] In some embodiments, where there are one signaling agent and two targeting moieties, the targeting moieties are linked together and the signaling agent is linked to one of the paired targeting moieties, wherein the signaling agent is linked to the Fc domain (see FIGS. 15A-L and 18A-L). In some embodiments, the Fc domain is heterodimeric. In some embodiments, the Fc domain comprises a mutation that reduces or eliminates its effector function.

[0408] In some embodiments, where there are one signaling agent and two targeting moieties, the targeting moieties are both linked to the signaling agent, wherein one of the targeting moieties is linked to the Fc domain (see FIGS. 15A-L and 18A-L). In some embodiments, the Fc domain is heterodimeric. In some embodiments, the Fc domain comprises a mutation that reduces or eliminates its effector function.

[0409] In some embodiments, where there are one signaling agent and two targeting moieties, the targeting moieties and the signaling agent are linked to the Fc domain (see FIGS. 20A-J and 21A-J). In some embodiments, the targeting moieties are linked on the terminus (see FIGS. 20A-J and 21A-J). In some embodiments, the Fc domain is heterodimeric. In some embodiments, the Fc domain comprises a mutation that reduces or eliminates its effector function.

[0410] In some embodiments, where there are two signaling agents and one targeting moiety, the signaling agents are linked to the Fc domain on the same terminus and the targeting moiety is linked to the Fc domain (see FIGS. 10A-J and 13A-J). In some embodiments, the signaling agents are linked to the Fc domain on the same Fc chain and the targeting moiety is linked on the other Fc chain (see FIGS. 22A-F and 23A-F). In some embodiments, the Fc domain is heterodimeric. In some embodiments, the Fc domain comprises a mutation that reduces or eliminates its effector function.

[0411] In some embodiments, where there are two signaling agents and one targeting moiety, a signaling agent is linked to the targeting moiety, which is linked to the Fc domain and the other signaling agent is linked to the Fc domain (see FIGS. 10A-J, 13A-J, 16A-L, and 19A-L). In some embodiments, the targeting moiety and the unpaired signaling agent are linked to different Fc chains (see FIGS. 10A-J and 13A-J). In some embodiments, the targeting moiety and the unpaired signaling agent are linked to different Fc chains on the same terminus (see FIGS. 10A-J and 13A-J). In some embodiments, the targeting moiety and the unpaired signaling agent are linked to different Fc chains on different termini (see FIGS. 10A-J and 13A-J). In some embodiments, the targeting moiety and the unpaired signaling agent are linked to the same Fc chains (see FIGS. 16A-L and 19A-L). In some embodiments, the Fc domain is heterodimeric. In some embodiments, the Fc domain comprises a mutation that reduces or eliminates its effector function.

[0412] In some embodiments, where there are two signaling agents and one targeting moiety, the targeting moiety is linked to a signaling agent, which is linked to the Fc domain and the other signaling agent is linked to the Fc domain (see FIGS. 10A-J and 13A-J). In some embodiments, the paired signaling agent and the unpaired signaling agent are linked to different Fc chains (see FIGS. 10A-J and 13A-J). In some embodiments, the paired signaling agent and the unpaired signaling agent are linked to different Fc chains on the same terminus (see FIGS. 10A-J and 13A-J). In some embodiments, the paired signaling agent and the unpaired signaling agent are linked to different Fc chains on different termini (see FIGS. 10A-J and 13A-J). In some embodiments, the Fc domain is heterodimeric. In some embodiments, the Fc domain comprises a mutation that reduces or eliminates its effector function.

[0413] In some embodiments, where there are two signaling agents and one targeting moiety, the signaling agents are linked together and the targeting moiety is linked to one of the paired signaling agents, wherein the targeting moiety is linked to the Fc domain (see FIGS. 16A-L and 19A-L). In some embodiments, the Fc domain is heterodimeric. In some embodiments, the Fc domain comprises a mutation that reduces or eliminates its effector function.

[0414] In some embodiments, where there are two signaling agents and one targeting moiety, the signaling agents are linked together and one of the signaling agents is linked to the Fc domain and the targeting moiety is linked to the Fc domain (see FIGS. 16A-L, 19A-L, 22A-F, and 23A-F). In some embodiments, the paired signaling agents and targeting moiety are linked to the same Fc chain (see FIGS. 16A-L and 19A-L). In some embodiments, the paired signaling agents and targeting moiety are linked to different Fc chains (see FIGS. 22A-F and 23A-F). In some embodiments, the paired signaling agents and targeting moiety are linked to different Fc chains on the same terminus (see FIGS. 22A-F and 23A-F). In some embodiments, the Fc domain is heterodimeric. In some embodiments, the Fc domain comprises a mutation that reduces or eliminates its effector function.

[0415] In some embodiments, where there are two signaling agents and one targeting moiety, the signaling agents are both linked to the targeting moiety, wherein one of the signaling agents is linked to the Fc domain (see FIGS. 16A-L and 19A-L). In some embodiments, the Fc domain is heterodimeric. In some embodiments, the Fc domain comprises a mutation that reduces or eliminates its effector function.

[0416] In some embodiments, where there are two signaling agents and one targeting moiety, the signaling agents are linked together and one of the signaling agents is linked to the targeting moiety and the other signaling agent is linked to the Fc domain (see FIGS. 16A-L and 19A-L).

[0417] In some embodiments, where there are two signaling agents and one targeting moiety, each signaling agent is linked to the Fc domain and the targeting moiety is linked to one of the signaling agents (see FIGS. 16A-L and 19A-L). In some embodiments, the signaling agents are linked to the same Fc chain (see FIGS. 16A-L and 19A-L).

[0418] In some embodiments, a targeting moiety or signaling agent is linked to the Fc domain, comprising one or both of CH2 and CH3 domains, and optionally a hinge region. For example, vectors encoding the targeting moiety, signaling agent, or combination thereof, linked as a single nucleotide sequence to an Fc domain can be used to prepare such polypeptides.

[0419] Multi-Specific Chimeras and Fusions with Signaling Agents

[0420] In some embodiments, the FAP binding agent of the present technology is part of a chimera or fusion or Fc-based chimeric protein complex with one or more signaling agents as described herein and/or one or more additional targeting moieties. Accordingly, the present technology provides for chimeric or fusion proteins or Fc-based chimeric protein complex that include one or more signaling agents and a targeting moiety against FAP and/or one or more additional targeting moieties.

[0421] In some embodiments, the FAP binding agent of the present technology is multispecific, i.e., the FAP binding agent comprises two or more targeting moieties having recognition domains that recognize and bind two or more targets, e.g. antigens, or receptors, or epitopes. In such embodiments, the FAP binding agent of the present technology may comprise two more targeting moieties having recognition domains that recognize and bind two or more epitopes on the same antigen or on different antigens. In some embodiments, such multi-specific FAP binding agents exhibit advantageous properties such as increased avidity and/or improved selectivity. In an embodiment, the FAP binding agent of the present technology comprises two targeting moieties and is bispecific, i.e., binds and recognizes two epitopes on the same antigen or on different antigens.

[0422] In some embodiments, the multispecific FAP binding agent of the present technology comprises two or more targeting moieties with each targeting moiety being an antibody or an antibody derivative as described herein. In an embodiment, the multispecific FAP binding agent of the present technology comprises at least one VHH comprising an antigen recognition domain against FAP and one antibody or antibody derivative comprising an antigen recognition domain against a tumor antigen.

[0423] In some embodiments, the present multispecific FAP binding agents have two or more targeting moieties that target different antigens or receptors, and one targeting moiety may be attenuated for its antigen or receptor, e.g. the targeting moiety binds its antigen or receptor with a low affinity or avidity (including, for example, at an affinity or avidity that is less than the affinity or avidity the other targeting moiety has for its for its antigen or receptor, for instance the difference between the binding affinities may be about 10-fold, or 25-fold, or 50-fold, or 100-fold, or 300-fold, or 500-fold, or 1000-fold, or 5000-fold; for instance the lower affinity or avidity targeting moiety may bind its antigen or receptor at a KD in the mid- to high-nM or low- to mid-pM range while the higher affinity or avidity targeting moiety may bind its antigen or receptor at a KD in the mid- to high-pM or low- to mid-nM range). For instance, in some embodiments, the present multispecific FAP binding agents comprises an attenuated targeting moiety that is directed against a promiscuous antigen or receptor, which may improve targeting to a cell of interest (e.g. via the other targeting moiety) and prevent effects across multiple types of cells, including those not being targeted for therapy (e.g. by binding promiscuous antigen or receptor at a higher affinity than what is provided in these embodiments).

[0424] The multispecific FAP binding agent of the present technology may be constructed using methods known in the art, see for example, U.S. Pat. No. 9,067,991, U.S. Patent Publication No. 20110262348 and WO 2004/041862, the entire contents of which are hereby incorporated by reference. In an illustrative embodiment, the multispecific FAP binding agent of the present technology comprising two or more targeting moieties may be constructed by chemical crosslinking, for example, by reacting amino acid residues with an organic derivatizing agent as described by Blattler et al., Biochemistry 24,1517-1524 and EP294703, the entire contents of which are hereby incorporated by reference. In another illustrative embodiment, the multispecific FAP binding agent comprising two or more targeting moieties is constructed by genetic fusion, i.e., constructing a single polypeptide which includes the polypeptides of the individual targeting moieties. For example, a single polypeptide construct may be formed which encodes a first VHH with an antigen recognition domain against FAP and a second antibody or antibody derivative with an antigen recognition domain against a tumor antigen. A method for producing bivalent or multivalent VHH polypeptide constructs is disclosed in PCT patent application WO 96/34103, the entire contents of which is hereby incorporated by reference. In a further illustrative embodiment, the multispecific FAP binding agent of the present technology may be constructed by using linkers. For example, the carboxy-terminus of a first VHH with an antigen recognition domain against FAP may be linked to the amino-terminus of a second antibody or antibody derivative with an antigen recognition domain against a tumor antigen (or vice versa). Illustrative linkers that may be used are described herein. In some embodiments, the components of the multispecific FAP binding agent of the present technology are directly linked to each other without the use of linkers.

[0425] In some embodiments, the multi-specific FAP binding agent of the present technology recognizes and binds to FAP and one or more antigens found on one or more immune cells, which can include, without limitation, megakaryocytes, thrombocytes, erythrocytes, mast cells, basophils, neutrophils, eosinophils, monocytes, macrophages, natural killer cells, T lymphocytes (e.g., cytotoxic T lymphocytes, T helper cells, natural killer T cells), B lymphocytes, plasma cells, dendritic cells, or subsets thereof. In some embodiments, the FAP binding agent specifically binds to an antigen of interest and effectively directly or indirectly recruits one of more immune cells.

[0426] In some embodiments, the multi-specific FAP binding agent of the present technology recognizes and binds to FAP and one or more antigens found on tumor cells. In these embodiments, the present FAP binding agents may directly or indirectly recruit an immune cell to a tumor cell or the tumor microenvironment. In some embodiments, the present FAP binding agents may directly or indirectly recruit an immune cell, e.g. an immune cell that can kill and/or suppress a tumor cell (e.g., a CTL), to a site of action (such as, by way of non-limiting example, the tumor microenvironment).

[0427] In some embodiments, the present FAP binding agents are capable of, or find use in methods involving, shifting the balance of immune cells in favor of immune attack of a tumor. For instance, the present FAP binding agents can shift the ratio of immune cells at a site of clinical importance in favor of cells that can kill and/or suppress a tumor (e.g. T cells, cytotoxic T lymphocytes, T helper cells, natural killer (NK) cells, natural killer T (NKT) cells, anti-tumor macrophages (e.g. M1 macrophages), neutrophils, B cells, dendritic cells or subsets thereof and in opposition to cells that protect tumors (e.g. myeloid-derived suppressor cells (MDSCs), regulatory T cells (Tregs); tumor associated neutrophils (TANs), M2 macrophages, tumor associated macrophages (TAMs), or subsets thereof). In some embodiments, the present FAP binding agent is capable of increasing a ratio of effector T cells to regulatory T cells.

[0428] In some embodiments, the multi-specific FAP binding agent of the present technology comprises a targeting moiety having an antigen recognition domain that specifically binds to an antigen associated with tumor cells. In some embodiments, the targeting moiety directly or indirectly recruits tumor cells. For instance, in some embodiments, the recruitment of the tumor cell is to one or more effector cell (e.g. an immune cell as described herein) that can kill and/or suppress the tumor cell. In some embodiments, the targeting moiety directly or indirectly recruits T cells to a tumor cell, for example, by virtue of the two targeting moieties interacting with their respective antigens on a tumor and FAP -positive immune cell (e.g. dendritic cells).

[0429] Tumor cells, or cancer cells refer to an uncontrolled growth of cells or tissues and/or an abnormal increased in cell survival and/or inhibition of apoptosis which interferes with the normal functioning of bodily organs and systems. For example, tumor cells include benign and malignant cancers, polyps, hyperplasia, as well as dormant tumors or micrometastases. Illustrative tumor cells include, but are not limited to cells of: basal cell carcinoma, biliary tract cancer; bladder cancer; bone cancer; brain and central nervous system cancer; breast cancer; cancer of the peritoneum; cervical cancer; choriocarcinoma; colon and rectum cancer; connective tissue cancer; cancer of the digestive system; endometrial cancer; esophageal cancer; eye cancer; cancer of the head and neck; gastric cancer (including gastrointestinal cancer); glioblastoma; hepatic carcinoma; hepatoma; intra-epithelial neoplasm; kidney or renal cancer; larynx cancer; leukemia; liver cancer; lung cancer (e.g., small-cell lung cancer, non-small cell lung cancer, adenocarcinoma of the lung, and squamous carcinoma of the lung); melanoma; myeloma; neuroblastoma; oral cavity cancer (lip, tongue, mouth, and pharynx); ovarian cancer; pancreatic cancer; prostate cancer; retinoblastoma; rhabdomyosarcoma; rectal cancer; cancer of the respiratory system; salivary gland carcinoma; sarcoma; skin cancer; squamous cell cancer; stomach cancer; testicular cancer; thyroid cancer; uterine or endometrial cancer; cancer of the urinary system; vulval cancer; lymphoma including Hodgkin's and non-Hodgkin's lymphoma, as well as B-cell lymphoma (including low grade/follicular non-Hodgkin's lymphoma (NHL); small lymphocytic (SL) NHL; intermediate grade/follicular NHL; intermediate grade diffuse NHL; high grade immunoblastic NHL; high grade lymphoblastic NHL; high grade small non-cleaved cell NHL; bulky disease NHL; mantle cell lymphoma; AIDS-related lymphoma; and Waldenstrom's Macroglobulinemia; chronic lymphocytic leukemia (CLL); acute lymphoblastic leukemia (ALL); Hairy cell leukemia; chronic myeloblastic leukemia; as well as other carcinomas and sarcomas; and post-transplant lymphoproliferative disorder (PTLD), as well as abnormal vascular proliferation associated with phakomatoses, edema (e.g. that associated with brain tumors), and Meigs' syndrome.

[0430] Tumor cells, or cancer cells also include, but are not limited to, carcinomas, e.g. various subtypes, including, for example, adenocarcinoma, basal cell carcinoma, squamous cell carcinoma, and transitional cell carcinoma), sarcomas (including, for example, bone and soft tissue), leukemia (including, for example, acute myeloid, acute lymphoblastic, chronic myeloid, chronic lymphocytic, and hairy cell), lymphomas and myelomas (including, for example, Hodgkin and non-Hodgkin lymphomas, light chain, non-secretory, MGUS, and plasmacytomas), and central nervous system cancers (including, for example, brain (e.g. gliomas (e.g. astrocytoma, oligodendroglioma, and ependymoma), meningioma, pituitary adenoma, and neuromas, and spinal cord tumors (e.g. meningiomas and neurofibroma).

[0431] Illustrative tumor antigens include, but are not limited to, MART-1/Melan-A, gp100, Dipeptidyl peptidase IV (DPPIV), adenosine deaminase-binding protein (ADAbp), cyclophilin b, Colorectal associated antigen (CRC)-0017-1A/GA733, Carcinoembryonic Antigen (CEA) and its immunogenic epitopes CAP-1 and CAP-2, etv6, am11, Prostate Specific Antigen (PSA) and its immunogenic epitopes PSA-1, PSA-2, and PSA-3, prostate-specific membrane antigen (PSMA), T-cell receptor/CD3-zeta chain, MAGE-family of tumor antigens (e.g., MAGE-A1, MAGE-A2, MAGE-A3, MAGE-A4, MAGE-A5, MAGE-A6, MAGE-A7, MAGE-A8, MAGE-A9, MAGE-A10, MAGE-A11, MAGE-Al2, MAGE-Xp2 (MAGE-B2), MAGE-Xp3 (MAGE-B3), MAGE-Xp4 (MAGE-B4), MAGE-C1, MAGE-C2, MAGE-C3, MAGE-C4, MAGE-05), GAGE-family of tumor antigens (e.g., GAGE-1, GAGE-2, GAGE-3, GAGE-4, GAGE-5, GAGE-6, GAGE-7, GAGE-8, GAGE-9), BAGE, RAGE, LAGE-1, NAG, GnT-V, MUM-1, CDK4, tyrosinase, p53, MUC family, HER2/neu, p21ras, RCAS1, a-fetoprotein, E-cadherin, a-catenin, 3-catenin and y-catenin, p120ctn, gp100 Pme1117, PRAME, NY-ESO-1, cdc27, adenomatous polyposis coli protein (APC), fodrin, Connexin 37, Ig-idiotype, p15, gp75, GM2 and GD2 gangliosides, viral products such as human papilloma virus proteins, Smad family of tumor antigens, Imp-1, NA, EBV-encoded nuclear antigen (EBNA)-1, brain glycogen phosphorylase, SSX-1, SSX-2 (HOM-MEL-40), SSX-1, SSX-4, SSX-5, SCP-1 CT-7, c-erbB-2, CD19, CD20, CD22, CD30, CD33, CD37, CD56, CD70, CD74, CD138, AGS16, MUC1, GPNMB, Ep-CAM, PD-L1, PD-L2, PMSA, and BCMA (TNFRSF17). In some embodiments, the FAP binding agent comprises a targeting moiety that binds one or more of these tumor antigens.

[0432] In some embodiments, the present multi-specific FAP binding agent recognizes and binds to FAP as well as an antigen on a tumor cell. In some embodiments, the multi-specific FAP binding agent directly or indirectly recruits CTLs to the tumor cell or tumor microenvironment.

[0433] In some embodiments, the present multi-specific FAP binding agent has targeting moieties which target two different cells (e.g. to make a synapse) or the same cell (e.g. to get a more concentrated signaling agent effect).

[0434] In some embodiments, the multi-specific FAP binding agent of the present technology comprises a targeting moiety having an antigen recognition domain that specifically binds to a target (e.g. antigen, receptor) associated with T cells. In some embodiments, the targeting moiety recruits directly or indirectly T cells. In an embodiment, the antigen recognition domains specifically bind to effector T cells. In some embodiments, the antigen recognition domain directly or indirectly recruits effector T cells, e.g., in some embodiments, to a therapeutic site (e.g. a locus with one or more disease cell or cell to be modulated for a therapeutic effect). Illustrative effector T cells include cytotoxic T cells (e.g. αβ TCR, CD3+, CD8+, CD45R0+); CD4+ effector T cells (e.g. αβ TCR, CD3+, CD4+, CCR7+, CD62Lhi, IL-7R/CD127+); CD8+ effector T cells (e.g. αβ TCR, CD3+, CD8+, CCR7+, CD62Lhi, IL-7R/CD127+); effector memory T cells (e.g. CD62Llow, CD44+, TCR, CD3+, IL-7R/CD127+, IL-15R+, CCR7low); central memory T cells (e.g. CCR7+, CD62L+, CD27+; or CCR7hi, CD44+, CD62Lhi, TCR, CD3+, IL-7R/CD127+, IL-15R+); CD62L+ effector T cells; CD8+ effector memory T cells (TEM) including early effector memory T cells (CD27+CD62L-) and late effector memory T cells (CD27−CD62L−) (TemE and TemL, respectively); CD127(+)CD25(low/−) effector T cells; CD127(−)CD25(−) effector T cells; CD8+ stem cell memory effector cells (TSCM) (e.g. CD44(low)CD62L(high)CD122(high)sca(+)); TH1 effector T-cells (e.g. CXCR3+, CXCR6+ and CCRS +; or αβ TCR, CD3+, CD4+, IL-12R+, IFNγR+, CXCR3+), TH2 effector T cells (e.g. CCR3′, CCR4′ and CCR8+; or αβ TCR, CD3+, CD4+, IL-4R+, IL-33R+, CCR4+, IL-17RB+, CRTH2+); TH9 effector T cells (e.g. αβ TCR, CD3+, CD4+); TH17 effector T cells (e.g. αβ TCR, CD3+, CD4+, IL-23R+, CCR6+, IL-1R+); CD4+CD45RO+CCR7+ effector T cells, ICOS+ effector T cells; CD4+CD45RO+CCR7(−) effector T cells; and effector T cells secreting IL-2, IL-4 and/or IFN-γ.

[0435] Illustrative T cell antigens of interest include, for example (and inclusive of the extracellular domains, where applicable): CD8, CD3, SLAMF4, IL-2Rα, 4-1BBTNFRSF9, IL-2 Rβ, ALCAM, B7-1, IL-4 R, B7-H3, BLAME/SLAMFS, CEACAM1, IL-6 R, CCR3, IL-7 Rα, CCR4, CXCRI/IL-S RA, CCR5, CCR6, IL-10Rα, CCR 7, IL-10 Rβ, CCRS, IL-12 Rβ1, CCR9, IL-12 Rβ2, CD2, IL-13 Rα1, IL-13, CD3, CD4, ILT2/CDS5j, ILT3/CDS5k, ILT4/CDS5d, ILT5/CDS5a, lutegrin a 4/CD49d, CDS, Integrin a E/CD103, CD6, Integrin a M/CD 11 b, CDS, Integrin a X/CD11c, Integrin β 2/CDIS, KIR/CD15S, CD27/TNFRSF7, KIR2DL1, CD2S, KIR2DL3, CD30/TNFRSFS, KIR2DL4/CD15Sd, CD31/PECAM-1, KIR2DS4, CD40 Ligand/TNFSF5, LAG-3, CD43, LAIR1, CD45, LAIR2, CDS3, Leukotriene B4-R1, CDS4/SLAMF5, NCAM-L1, CD94, NKG2A, CD97, NKG2C, CD229/SLAMF3, NKG2D, CD2F-10/SLAMF9, NT-4, CD69, NTB-A/SLAMF6, Common γ Chain/IL-2 Rγ, Osteopontin, CRACC/SLAMF7, PD-1, CRTAM, PSGL-1, CTLA-4, RANK/TNFRSF11A, CX3CR1, CX3CL1, L-Selectin, CXCR3, SIRP β 1, CXCR4, SLAM, CXCR6, TCCR/WSX-1, DNAM-1, Thymopoietin, EMMPRIN/CD147, TIM-1, EphB6, TIM-2, Fas/TNFRSF6, TIM-3, Fas Ligand/TNFSF6, TIM-4, Fcγ RIII/CD16, TIM-6, TNFR1/TNFRSF1A, Granulysin, TNF RIII/TNFRSF1B, TRAIL RI/TNFRSFIOA, ICAM-1/CD54, TRAIL R2/TNFRSF10B, ICAM-2/CD102, TRAILR3/TNFRSF10C, IFN-γR1, TRAILR4/TNFRSF10D, IFN-γ R2, TSLP, IL-1 R1 and TSLP R. In some embodiments, the FAP binding agent comprises a targeting moiety that binds one or more of these illustrative T cell antigens.

[0436] In some embodiments, the multi-specific FAP binding agent of the present technology comprises a targeting moiety against CD8 which is a VHH comprising a single amino acid chain having four “framework regions” or FRs and three “complementary determining regions” or CDRs. As used herein, “framework region” or “FR” refers to a region in the variable domain which is located between the CDRs. As used herein, “complementary determining region” or “CDR” refers to variable regions in VHHs that contains the amino acid sequences capable of specifically binding to antigenic targets.

[0437] In some embodiments, the multi-specific FAP binding agent of the present technology comprises a VHH against CD8 having a variable domain comprising at least one CD8 CDR1, CD8 CDR2, and/or CD8 CDR3 sequences.

[0438] In some embodiments, the CD8 CDR1 sequence is selected from: SEQ ID NO: 192 or SEQ ID NO: 193.

[0439] In some embodiments, the CD8 CDR2 sequence is selected from: SEQ ID NO: 194 or SEQ ID NO: 195.

[0440] In some embodiments, the CD8 CDR3 sequence is selected from: SEQ ID NO: 196 or SEQ ID NO: 197 or SEQ ID NO: 198.

[0441] In some embodiments, the CD8 targeting moiety comprises an amino acid sequence selected from the following sequences: R3HCD27 (SEQ ID NO: 199); or R3HCD129: (SEQ ID NO: 200); or R2HCD26: (SEQ ID NO: 201).

[0442] In some embodiments, the CD8 targeting moiety comprises a VHH having a variable domain comprising at least one CD8 CDR1, CD8 CDR2, and/or CD8 CDR3 sequences as described below.

[0443] In some embodiments, the CD8 CDR1 sequence is selected from: SEQ ID NO: 202 to SEQ ID NO: 270.

[0444] In some embodiments, the CD8 CDR2 sequence is selected from: SEQ ID NO: 271 to SEQ ID NO: 339.

[0445] In some embodiments, the CD8 CDR3 sequence is selected from: SEQ ID NO: 340 to SEQ ID NO: 408.

[0446] In some embodiments, the CD8 targeting moiety comprises an amino acid sequence selected from the following sequences 1CDA 7 (SEQ ID NO: 409); or 1CDA 12 (SEQ ID NO: 410); or 1CDA 14 (SEQ ID NO: 411); or 1CDA 15 (SEQ ID NO: 412); or 1CDA 17 (SEQ ID NO: 413); or 1CDA 18 (SEQ ID NO: 414); or 1CDA 19 (SEQ ID NO: 415); or 1CDA 24(SEQ ID NO: 416); or 1CDA 26 (SEQ ID NO: 417); or 1CDA 28 (SEQ ID NO: 418); or 1CDA 37 (SEQ ID NO: 419); or 1CDA 43 (SEQ ID NO: 420); or 1CDA 45 (SEQ ID NO: 421); or 1CDA 47 (SEQ ID NO: 422); or 1CDA 48 (SEQ ID NO: 423); or 1CDA 58 (SEQ ID NO: 424); or 1CDA 65 (SEQ ID NO: 425); or 1CDA 68 (SEQ ID NO: 426); or 1CDA 73 (SEQ ID NO: 427); or 1CDA 75 (SEQ ID NO: 428); or 1CDA 86 (SEQ ID NO: 429); or 1CDA 87 (SEQ ID NO: 430); or 1CDA 88 (SEQ ID NO: 431); or 1CDA 89 (SEQ ID NO: 432); or 1CDA 92 (SEQ ID NO: 433); or 1CDA 93 (SEQ ID NO: 434); or 2CDA 1 (SEQ ID NO: 435); or 2CDA 5 (SEQ ID NO: 436); or 2CDA 22 (SEQ ID NO: 437); or 2CDA 28 (SEQ ID NO: 438); or 2CDA 62 (SEQ ID NO: 439); or 2CDA 68 (SEQ ID NO: 440); or 2CDA 73 (SEQ ID NO: 441); or 2CDA 74 (SEQ ID NO: 442); or 2CDA 75 (SEQ ID NO: 443); or 2CDA 77 (SEQ ID NO: 444); or 2CDA 81 (SEQ ID NO: 445); or 2CDA 87 (SEQ ID NO: 446); or 2CDA 88 (SEQ ID NO: 447); or 2CDA 89 (SEQ ID NO: 448); or 2CDA 91 (SEQ ID NO: 449); or 2CDA 92 (SEQ ID NO: 450); or 2CDA 93 (SEQ ID NO: 451); or 2CDA 94 (SEQ ID NO: 452); or 2CDA 95 (SEQ ID NO: 453); or 3CDA 3 (SEQ ID NO: 454); or 3CDA 8 (SEQ ID NO: 455); or 3CDA 11 (SEQ ID NO: 456); or 3CDA 18 (SEQ ID NO: 457); or 3CDA 19 (SEQ ID NO: 458); or 3CDA 21 (SEQ ID NO: 459); or 3CDA 24 (SEQ ID NO: 460); or 3CDA 28 (SEQ ID NO: 461); or 3CDA 29 (SEQ ID NO: 462); or 3CDA 31 (SEQ ID NO: 463); or 3CDA 32 (SEQ ID NO: 464); or 3CDA 33 (SEQ ID NO: 465); or 3CDA 37 (SEQ ID NO: 466); or 3CDA 40 (SEQ ID NO: 467); or 3CDA 41 (SEQ ID NO: 468); or 3CDA 48 (SEQ ID NO: 469); or 3CDA 57 (SEQ ID NO: 470); or 3CDA 65 (SEQ ID NO: 471); or 3CDA 70 (SEQ ID NO: 472); or 3CDA 73 (SEQ ID NO: 473); or 3CDA 83 (SEQ ID NO: 474); or 3CDA 86 (SEQ ID NO: 475); or 3CDA 88 (SEQ ID NO: 476); or 3CDA 90 (SEQ ID NO: 477).

[0447] In various illustrative embodiments, the CD8 targeting moiety comprises an amino acid sequence selected from any one of the above sequences without the terminal histidine tag sequence (i.e., HHHHHH; SEQ ID NO: 43).

[0448] In some embodiments, the CD8 targeting moiety comprises an amino acid sequence described in US Patent Publication No. 2014/0271462, the entire contents of which are incorporated by reference. In some embodiments, the CD8 targeting moiety comprises an amino acid sequence described in Table 0.1, Table 0.2, Table 0.3, and/or FIGS. 1A-121 of US Patent Publication No. 2014/0271462, the entire contents of which are incorporated by reference. In some embodiments, the CD8 targeting moiety comprises a HCDR1 of SEQ ID NO: 478 or 479 and/or a HCDR2 of SEQ ID NO: 478 or 479 and/or a HCDR3 of SEQ ID NO: 478 or 479 and/or a LCDR1 of SEQ ID NO: 480 and/or a LCDR2 of SEQ ID NO: 480 and/or a LCDR3 of SEQ ID NO: 480.

[0449] In some embodiments, the present technology contemplates the use of any natural or synthetic analogs, mutants, variants, alleles, homologs and orthologs (herein collectively referred to as “analogs”) of the targeting moiety directed against CD8 as described herein. In some embodiments, the amino acid sequence of the targeting moiety directed against CD8 further includes an amino acid analog, an amino acid derivative, or other non-classical amino acids.

[0450] In some embodiments, the multi-specific FAP binding agent of the present technology comprises a targeting moiety having an antigen recognition domain that specifically binds to a target (e.g., antigen, receptor) associated with B cells. In some embodiments, the targeting moiety directly or indirectly recruits B cells, e.g., to a therapeutic site (e.g. a locus with one or more disease cell or cell to be modulated for a therapeutic effect). By way of example, but not by way of limitation, in some embodiments, the B cell antigens include, for example, CD10, CD19, CD20, CD21, CD22, CD23, CD24, CD37, CD38, CD39, CD40, CD70, CD72, CD73, CD74, CDw75, CDw76, CD77, CD78, CD79a/b, CD80, CD81, CD82, CD83, CD84, CD85, CD86, CD89, CD98, CD126, CD127, CDw130, CD138, CDw150, and B-cell maturation antigen (BCMA). In some embodiments, the FAP binding agent comprises a targeting moiety that binds one or more of the above disclosed B cell antigens.

[0451] In some embodiments, the multi-specific FAP binding agent of the present technology comprises a targeting moiety having an antigen recognition domain that specifically bind to a target (e.g. antigen, receptor) associated with Natural Killer cells. In some embodiments, the targeting moiety directly or indirectly recruits Natural Killer cells, e.g., to a therapeutic site (e.g. a locus with one or more disease cell or cell to be modulated for a therapeutic effect). By way of example, but not by way of limitation, in some embodiments, the Natural Killer cell antigens include, for example, TIGIT, 2B4/SLAMF4, KIR2DS4, CD155/PVR, KIR3DL1, CD94, LMIR1/CD300A, CD69, LMIR2/CD300c, CRACC/SLAMF7, LMIR3/CD300LF, Kidalpha, DNAM-1, LMIR5/CD300LB, Fc-epsilon RII, LMIR6/CD300LE, Fc- y RI/CD64, MICA, Fc-y RIIB/CD32b, MICB, Fc-y RIIC/CD32c, MULT-1, Fc-y RIIA/CD32a, Nectin-2/CD112, Fc-y RIII/CD16, NKG2A, FcRH1/IRTA5, NKG2C, FcRH2/IRTA4, NKG2D, FcRH4/IRTA1, NKp30, FcRH5/IRTA2, NKp44, Fc-Receptor-like 3/CD16-2, NKp46/NCR1, NKp80/KLRF1, NTB-A/SLAMF6, Rae-1, Rae-1 a, Rae-1 p, Rae-1 delta, H60, Rae-1 epsilon, ILT2/CD85j, Rae-1 y, ILT3/CD85k, TREM-1, ILT4/CD85d, TREM-2, ILT5/CD85a, TREM-3, KIR/CD158, TREML1/TLT-1, KIR2DL1, ULBP-1, KIR2DL3, ULBP-2, KIR2DL4/CD158d and ULBP-3. In some embodiments, the FAP binding agent comprises a targeting moiety that binds one or more of the above disclosed NK cell antigens.

[0452] In some embodiments, the targeting moiety recognizes and/or binds FMS-like tyrosine kinase 3 (Flt3) or is a natural ligand for Flt3, such as, FMS-like tyrosine kinase 3 ligand (Flt3L) or a truncated region thereof (e.g., which is able to bind Flt3). In some embodiments, the targeting moiety is an extracellular domain of Flt3L. In some embodiments, the targeting moiety comprising a Flt3L domain, wherein the Flt3L domain is a single chain dimer, optionally where one Flt3L domain is conncted to the other Flt3L domain via one or more linkers, wherein the linker is a flexible linker.

[0453] In some embodiments, the multi-specific FAP binding agent of the present technology comprises a targeting moiety having an antigen recognition domain that specifically binds to a target (e.g. antigen, receptor) associated with macrophages/monocytes. In some embodiments, the targeting moiety directly or indirectly recruits macrophages/monocytes, e.g., to a therapeutic site (e.g. a locus with one or more disease cell or cell to be modulated for a therapeutic effect). By way of example, but not by way of limitation, in some embodiments, the macrophages/monocyte antigens include, for example, SIRP1a, B7-1/CD80, ILT4/CD85d, B7-H1, ILT5/CD85a, Common 3 Chain, Integrin a 4/CD49d, BLAME/SLAMF8, Integrin a X/CDIIc, CCL6/C10, Integrin 3 2/CD18, CD155/PVR, Integrin 3 3/CD61, CD31/PECAM-1, Latexin, CD36/SR-B3, Leukotriene B4 R1, CD40/TNFRSF5, LIMPIIISR-B2, CD43, LMIR1/CD300A, CD45, LMIR2/CD300c, CD68, LMIR3/CD300LF, CD84/SLAMF5, LMIR5/CD300LB, CD97, LMIR6/CD300LE, CD163, LRP-1, CD2F-10/SLAMF9, MARCO, CRACC/SLAMF7, MD-1, ECF-L, MD-2, EMMPRIN/CD147, MGL2, Endoglin/CD105, Osteoactivin/GPNMB, Fc-y RI/CD64, Osteopontin, Fc-y RIIB/CD32b, PD-L2, Fc-y RIIC/CD32c, Siglec-3/CD33, Fc-y RIIA/CD32a, SIGNR1/CD209, Fc-y RIII/CD16, SLAM, GM-CSF R a, TCCR/WSX-1, ICAM-2/CD102, TLR3, IFN-γ RI, TLR4, IFN-gamma R2, TREM-I, IL-I RII, TREM-2, ILT2/CD85j, TREM-3, ILT3/CD85k, TREML1/TLT-1, 2B4/SLAMF 4, IL-10 R a, ALCAM, IL-10 Rp, AminopeptidaseN/ANPEP, ILT2/CD85j, Common 3 Chain, ILT3/CD85k, Clq R1/CD93, ILT4/CD85d, CCR1, ILT5/CD85a, CCR2, CD206, Integrin a 4/CD49d, CCR5, Integrin a M/CDII b, CCR8, Integrin a X/CDIIc, CD155/PVR, Integrin 3 2/CD18, CD14, Integrin 13 3/CD61, CD36/SR-B3, LAIR1, CD43, LAIR2, CD45, Leukotriene B4-R1, CD68, LIMPIIISR-B2, CD84/SLAMFS, LMIR1/CD300A, CD97, LMIR2/CD300c, CD163, LMIR3/CD300LF, Coagulation Factor III/Tissue Factor, LMIR5/CD300LB, CX3CR1, CX3CL1, LMIR6/CD300LE, CXCR4, LRP-1, CXCR6, M-CSF R, DEP-1/CD148, MD-1, DNAM-1, MD-2, EMMPRIN/CD147, MMR, Endoglin/CD105, NCAM-L1, Fc-y RI/CD64, PSGL-1, Fc-y RIIIICD16, RP105, G-CSF R, L-Selectin, GM-CSF R a, Siglec-3/CD33, HVEM/TNFRSF14, SLAM, ICAM-1/CD54, TCCR/WSX-1, ICAM-2/CD102, TREM-I, IL-6 R, TREM-2, CXCRI/IL-8 RA, TREM-3 and TREMLITTLT-1. In some embodiments, the FAP binding agent comprises a targeting moiety that binds one or more of the above disclosed macrophage/monocyte antigens.

[0454] In some embodiments, the multi-specific FAP binding agent of the present technology comprises a targeting moiety having an antigen recognition domain that specifically binds to a target (e.g. antigen, receptor) associated with dendritic cells. In some embodiments, the targeting moiety directly or indirectly recruits dendritic cells, e.g., to a therapeutic site (e.g. a locus with one or more disease cell or cell to be modulated for a therapeutic effect). By way of example, but not by way of limitation, in some embodiments, the dendritic cell (DC) antigens include, for example, FAP, XCR1, RANK, CD36/SRB3, LOX-1/SR-El, CD68, MARCO, CD163, SR-A1/MSR, CD5L, SREC-1, CL-PI/C0LEC12, SREC-I I, LIMPIIISRB2, RP105, TLR4, TLR1, TLR5, TLR2, TLR6, TLR3, TLR9, 4-IBB Ligand/TNFSF9, IL-12/1L-23 p40, 4-Amino-1,8-naphthalimide, ILT2/CD85j, CCL21/6Ckine, ILT3/CD85k, 8-oxo-dG, ILT4/CD85d, 8D6A, ILT5/CD85a, A2B5, lutegrin a 4/CD49d, Aag, Integrin p 2/CD18, AMICA, Langerin, B7-2/CD86, Leukotriene B4 RI, B7-H3, LMIR1/CD300A, BLAME/SLAMF8, LMIR2/CD300c, Clq R1/CD93, LMIR3/CD300LF, CCR6, LMIR5/CD300LB CCR7, LMIR6/CD300LE, CD40/TNFRSF5, MAG/Siglec-4-a, CD43, MCAM, CD45, MD-1, CD68, MD-2, CD83, MDL-1/CLEC5A, CD84/SLAMF5, MMR, CD97, NCAMLI, CD2F-10/SLAMF9, Osteoactivin GPNMB, Chern 23, PD-L2, CLEC-1, RP105, CLEC-2, CLEC-8, Siglec-2/CD22, CRACC/SLAMF7, Siglec-3/CD33, DC-SIGN, DEC-205, Siglec-5, DC-SIGNR/CD299, Siglec-6, DCAR, Siglec-7, DCIR/CLEC4A, Siglec-9, DEC-205, Siglec-10, Dectin-1/CLEC7A, Siglec-F, Dectin-2/CLEC6A, SIGNR1/CD209, DEP-1/CD148, SIGNR4, DLEC, SLAM, EMMPRIN/CD147, TCCR/WSX-1, Fc-y R1/CD64, TLR3, Fc-y RIIB/CD32b, TREM-1, Fc-y RIIC/CD32c, TREM-2, Fc-y RIIA/CD32a, TREM-3, Fc-y RIII/CD16, TREML1/TLT-1, ICAM-2/CD102, DEC205, and Vanilloid R1. In some embodiments, the FAP binding agent comprises a targeting moiety that binds one or more of the above-disclosed DC antigens.

[0455] In some embodiments, the present chimeric protein or Fc-based chimeric protein complex comprises a targeting moiety comprising an amino acid sequence that is at least 60% identical to any one of the sequences disclosed herein. For example, in some embodiments, the chimeric protein or Fc-based chimeric protein complex comprises a targeting moiety comprising an amino acid sequence that is at least about 60%, at least about 61%, at least about 62%, at least about 63%, at least about 64%, at least about 65%, at least about 66%, at least about 67%, at least about 68%, at least about 69%, at least about 70%, at least about 71%, at least about 72%, at least about 73%, at least about 74%, at least about 75%, at least about 76%, at least about 77%, at least about 78%, at least about 79%, at least about 80%, at least about 81%, at least about 82%, at least about 83%, at least about 84%, at least about 85%, at least about 86%, at least about 87%, at least about 88%, at least about 89%, at least about 90%, at least about 91%, at least about 92%, at least about 93%, at least about 94%, at least about 95%, at least about 96%, at least about 97%, at least about 98%, at least about 99%, or 100% identical to any one of the sequences discloses herein (e.g. about 60%, or about 61%, or about 62%, or about 63%, or about 64%, or about 65%, or about 66%, or about 67%, or about 68%, or about 69%, or about 70%, or about 71%, or about 72%, or about 73%, or about 74%, or about 75%, or about 76%, or about 77%, or about 78%, or about 79%, or about 80%, or about 81%, or about 82%, or about 83%, or about 84%, or about 85%, or about 86%, or about 87%, or about 88%, or about 89%, or about 90%, or about 91%, or about 92%, or about 93%, or about 94%, or about 95%, or about 96%, or about 97%, or about 98%, about 99% or about 100% sequence identity to any one of the sequences disclosed herein).

[0456] In some embodiments, the multi-specific FAP binding agent of the present technology comprises a targeting moiety having an antigen recognition domain that specifically binds a target (e.g. antigen, receptor) on immune cells selected from, but not limited to, megakaryocytes, thrombocytes, erythrocytes, mast cells, basophils, neutrophils, and eosinophils. In some embodiments, the antigen recognition domains directly or indirectly recruit megakaryocytes, thrombocytes, erythrocytes, mast cells, basophils, neutrophils, and eosinophil, e.g., to a therapeutic site (e.g. a locus with one or more disease cell or cell to be modulated for a therapeutic effect).

[0457] In some embodiments, the multi-specific FAP binding agent of the present technology comprises a targeting moiety having an antigen recognition domain that specifically binds to a target (e.g. antigen, receptor) associated with megakaryocytes and/or thrombocytes. By way of example, but not by way of limitation, in some embodiments, the megakaryocyte and/or thrombocyte antigens include, for example, GP 11b/111a, GP1b, vWF, PF4, and TSP. In some embodiments, the FAP binding agent comprises a targeting moiety that binds one or more of the above-disclosed megakaryocyte and/or thrombocyte antigens.

[0458] In some embodiments, the multi-specific FAP binding agent of the present technology comprises a targeting moiety having an antigen recognition domain that specifically binds to a target (e.g. antigen, receptor) associated with erythrocytes. By way of example, but not by way of limitation, in some embodiments, the erythrocyte antigens include, for example, CD34, CD36, CD38, CD41a (platelet glycoprotein 11b/111a), CD41b (GPIIb), CD71 (transferrin receptor), CD105, glycophorin A, glycophorin C, c-kit, HLA-DR, H2 (MHC-I1), and Rhesus antigens. In some embodiments, the FAP binding agent comprises a targeting moiety that binds one or more of the above disclosed erythrocyte antigens.

[0459] In some embodiments, the multi-specific FAP binding agent of the present technology comprises a targeting moiety having an antigen recognition domain that specifically binds to a target (e.g. antigen, receptor) associated with mast cells. By way of example, but not by way of limitation, in some embodiments, the mast cells antigens include, for example, SCFR/CD117, Fca, CD2, CD25, CD35, CD88, CD203c, C5R1, CMAI, FCERIA, FCER2, TPSABI. In some embodiments, the FAP binding agent comprises a targeting moiety that binds one or more of the above disclosed mast cell antigens.

[0460] In some embodiments, the multi-specific FAP binding agent of the present technology comprises a targeting moiety having an antigen recognition domain that specifically binds to a target (e.g. antigen, receptor) associated with basophils. By way of example, but not by way of limitation, in some embodiments, the basophils antigens include, for example, Fca, CD203c, CD123, CD13, CD107a, CD107b, and CD164. In some embodiments, the FAP binding agent comprises a targeting moiety that binds one or more of the above disclosed basophil antigens.

[0461] In some embodiments, the multi-specific FAP binding agent of the present technology comprises a targeting moiety having an antigen recognition domain that specifically binds to a target (e.g. antigen, receptor) associated with neutrophils. By way of example, but not by way of limitation, in some embodiments, the neutrophils antigens include, for example, 7D5, CD10/CALLA, CD13, CD16 (FcRlll), CD18 proteins (LFA-1, CR3, and p150, 95), CD45, CD67, and CD177. In some embodiments, the FAP binding agent comprises a targeting moiety that binds one or more of the above-disclosed neutrophil antigens.

[0462] In some embodiments, the multi-specific FAP binding agent of the present technology comprises a targeting moiety having an antigen recognition domain that specifically binds to a target (e.g. antigen, receptor) associated with eosinophils. By way of example, but not by way of limitation, in some embodiments, the eosinophils antigens include, for example, CD35, CD44 and CD69. In some embodiments, the FAP binding agent comprises a targeting moiety that binds one or more of the above-disclosed eosinophil antigens.

[0463] In some embodiments, the multi-specific FAP binding agent of the present technology comprises a targeting moiety having an antigen recognition domain that specifically binds to any appropriate antigen or receptor or cell surface markers known by the skilled artisan. In some embodiments, the antigen or cell surface marker is a tissue-specific marker. By way of example, but not by way of limitation, in some embodiments, the tissue-specific markers include, but are not limited to, endothelial cell surface markers (such as, e.g., ACE, CD14, CD34, CDH5, ENG, ICAM2, MCAM, NOS3, PECAMI, PROCR, SELF, SELP, TEK, THBD, VCAMI, VWF); smooth muscle cell surface markers (such as, e.g., ACTA2, MYHIO, MYHI 1, MYH9, MYOCD); fibroblast (stromal) cell surface markers (such as, e.g., ALCAM, CD34, COLIAI, COL1A2, COL3A1, FAP, PH-4); epithelial cell surface markers (such as, e.g., CDID, K61RS2, KRTIO, KRT13, KRT17, KRT18, KRT19, KRT4, KRT5, KRT8, MUCI, TACSTDI); neovasculature markers (such as, e.g., CD13, TFNA, Alpha-v beta-3 (av33), E-selectin); and adipocyte surface markers (such as, e.g., ADIPOQ, FABP4, and RETN). In some embodiments, the FAP binding agent comprises a targeting moiety that binds one or more of the above disclosed antigens.

[0464] In some embodiments, the multi-specific FAP binding agent of the present technology comprises a targeting moiety having an antigen recognition domain that specifically binds to a checkpoint marker expressed on a T cell. In some embodiments, the checkpoint marker is one or more checkpoint marker selected from PD-1, CD28, CTLA4, ICOS, BTLA, KIR, LAG3, CD137, OX40, CD27, CD40L, TIM3, and A2aR.

[0465] In some embodiments, the multi-specific FAP binding agent of the present technology comprises a targeting moiety having an antigen recognition domain that specifically binds to a checkpoint marker. In some embodiments, the checkpoint marker is one or more checkpoint marker selected from PD-1/PD-L1 or PD-L2, CD28/CD80 or CD86, CTLA4/ CD80 or CD86, ICOS/ICOSL or B7RP1, BTLA/HVEM, KIR, LAG3, CD137/CD137L, OX40/OX4OL, CD27, CD4OL, TIM3/Ga19, and A2aR.

[0466] By way of example, but not by way of limitation, in some embodiments, the present multispecific FAP binding agent comprises a targeting moiety directed against (i) CD8; (ii) a checkpoint marker expressed on a T cell, e.g. one or more of PD-1, CD28, CTLA4, ICOS, BTLA, KIR, LAG3, CD137, OX40, Cd27, CD4OL, TIM3, and A2aR and/or (iii) a targeting moiety is directed against a tumor cell, along with any of the modified (e.g. mutant) signaling agents described herein.

[0467] In some embodiments, the present multi-specific FAP binding agent has one or more targeting moieties directed against PD-1. In some embodiments, the FAP binding agent has one or more targeting moieties that selectively bind a PD-1 polypeptide. In some embodiments, the FAP binding agent comprises one or more antibodies, antibody derivatives or formats, peptides or polypeptides, or fusion proteins that selectively bind a PD-1 polypeptide.

[0468] In some embodiments, the multi-specific FAP binding agent of the present technology comprises a VHH against PD-1 having a variable domain comprising at least one PD-1 CDR1, PD-1 CDR2, and/or PD-1 CDR3 sequences.

[0469] In some embodiments, the PD-1 CDR1 sequence is selected from SEQ ID NO: 481 to SEQ ID NO: 494.

[0470] In some embodiments, the PD-1 CDR2 sequence is selected from: SEQ ID NO: 495 to SEQ ID NO: 508.

[0471] In some embodiments, the PD-1 CDR3 sequence is selected from: SEQ ID NO: 509 to SEQ ID NO: 521.

[0472] In various illustrative embodiments, the PD-1 targeting moiety comprises an amino acid sequence selected from the following sequences: 2PD23: (SEQ ID NO: 522); or 2PD26: (SEQ ID NO: 523); or 2PD90: (SEQ ID NO: 524); or 2PD-106: (SEQ ID NO: 525); or 2PD-16: (SEQ ID NO: 526); or 2PD71: (SEQ ID NO: 527); or 2PD-152: (SEQ ID NO: 528); or 2PD-12: (SEQ ID NO: 529); or 3PD55: (SEQ ID NO: 530); or 3PD82: (SEQ ID NO: 531); or 2PD8: (SEQ ID NO: 532); or 2PD27: (SEQ ID NO: 533); or 2PD82: (SEQ ID NO: 534); or

[0473] 3PD36: (SEQ ID NO: 535).

[0474] In various illustrative embodiments, the PD-1 targeting moiety comprises an amino acid sequence selected from any one of the above without the terminal histidine tag sequence (i.e., without HHHHHH, SEQ ID NO: 43).

[0475] In some embodiments, the targeting moiety comprises the anti-PD-1 antibody pembrolizumab (a/k/a MK-3475, KEYTRUDA®), or fragments thereof. In some embodiments, the targeting moiety is one or more of pembrolizumab and other humanized anti-PD-1 antibodies disclosed in Hamid, et al. (2013) New England Journal of Medicine 369 (2): 134-44, US 8,354,509, and WO 2009/114335, the entire disclosures of which are hereby incorporated by reference. By way of example, but not by way of limitation, in some embodiments, the pembrolizumab or an antigen-binding fragment thereof for use in the methods provided herein comprises a heavy chain comprising the amino acid sequence of: (SEQ ID NO: 536); and/or a light chain comprising the amino acid sequence of: (SEQ ID NO: 537).

[0476] In some embodiments, the targeting moiety comprises the anti-PD-1 antibody, nivolumab (a/k/a BMS-936558, MDX-1106, ONO-4538, OPDIVO®), or fragments thereof. In some embodiments, the targeting moiety is one or more of the nivolumab (clone 5C4) and other human monoclonal antibodies that specifically bind to PD-1 disclosed in U.S. Pat. No. 8,008,449 and WO 2006/121168, the entire disclosures of which are hereby incorporated by reference. By way of example, but not by way of limitation, in some embodiments, the nivolumab or an antigen-binding fragment thereof for use in the methods provided herein comprises a heavy chain comprising the amino acid sequence of: (SEQ ID NO: 538); and/or a light chain comprising the amino acid sequence of: (SEQ ID NO: 539).

[0477] In some embodiments, the targeting moiety comprises the anti-PD-1 antibody pidilizumab (a/k/a CT-011, hBAT or hBAT-1), or fragments thereof. In some embodiments, the pidilizumab and other humanized anti-PD-I monoclonal antibodies are selected from pidilizumab and other humanized anti-PD-I monoclonal antibodies disclosed in US 2008/0025980 and WO 2009/101611, the entire disclosures of which are hereby incorporated by reference. By way of example, but not by way of limitation, in some embodiments, the anti-PD-1 antibody or an antigen-binding fragment thereof for use in the methods provided herein comprises one or more light chain variable regions comprising an amino acid sequence selected from the following sequences disclosed in US 2008/0025980: (SEQ ID NO: 540); (SEQ ID NO: 541); (SEQ ID NO: 542); and (SEQ ID NO: 543); and/or a heavy chain comprising an amino acid sequence selected from the following sequences disclosed in US 2008/0025980: (SEQ ID NO: 544); (SEQ ID NO: 545); (SEQ ID NO: 546); (SEQ ID NO: 547); and (SEQ ID NO: 548).

[0478] In some embodiments, the targeting moiety comprises a light chain comprising: (SEQ ID NO: 549); and a heavy chain comprising: (SEQ ID NO: 550).

[0479] In some embodiments, the targeting moiety comprises AMP-514 (a/k/a MEDI-0680).

[0480] In some embodiments, the targeting moiety comprises the PD-L2-Fc fusion protein AMP-224 or fragments thereof, which are disclosed in WO 2010/027827 and WO 2011/066342, the entire disclosures of which are hereby incorporated by reference. In some embodiments, the targeting moiety comprises: (SEQ ID NO: 551) and/or a B7-DC fusion protein comprising: (SEQ ID NO: 552).

[0481] In some embodiments, the targeting moiety comprises the peptide AUNP 12 or any other peptides disclosed in US 2011/0318373 or U.S. Pat. No. 8,907,053. By way of example, but not by way of limitation, in some embodiments, the targeting moiety comprises the AUNP 12 sequence of:

[chemical structure]

[0482] In some embodiments, the targeting moiety comprises the anti-PD-1 antibody 1E3, or fragments thereof, disclosed in US 2014/0044738, the entire disclosures of which are hereby incorporated by reference. By way of example, but not by way of limitation, in some embodiments, the 1E3 or an antigen-binding fragment thereof for use in the methods provided herein comprises a heavy chain variable region comprising the amino acid sequence of: (SEQ ID NO: 554); and/or a light chain variable region comprising the amino acid sequence of: (SEQ ID NO: 555).

[0483] In an embodiment, the targeting moiety comprises the anti-PD-1 antibody 1E8, or fragments thereof, disclosed in US 2014/0044738, the entire disclosures of which are hereby incorporated by reference. By way of example, but not by way of limitation, in some embodiments, the 1E8 or an antigen-binding fragment thereof for use in the methods provided herein comprises a heavy chain variable region comprising the amino acid sequence of: (SEQ ID NO: 556); and/or a light chain variable region comprising the amino acid sequence of: (SEQ ID NO: 557).

[0484] In some embodiments, the targeting moiety comprises the anti-PD-1 antibody 1H3, or fragments thereof, disclosed in US 2014/0044738, the entire disclosures of which are hereby incorporated by reference. By way of example, but not by way of limitation, in some embodiments, the 1H3 or an antigen-binding fragment thereof for use in the methods provided herein comprises a heavy chain variable region comprising the amino acid sequence of: (SEQ ID NO: 558);

[0485] and/or light chain variable region comprising the amino acid sequence of: (SEQ ID NO: 559).

[0486] In some embodiments, the targeting moiety comprises a VHH directed against PD-1 disclosed in U.S. Pat. No. 8,907,065 and WO 2008/071447, the entire disclosures of which are hereby incorporated by reference. By way of example, but not by way of limitation, in some embodiments, the VHHs against PD-1 comprise one or more of the following sequences disclosed in U.S. Pat. No. 8,907,065: (SEQ ID NO: 560); (SEQ ID NO: 561); (SEQ ID NO: 562); (SEQ ID NO: 563); or (SEQ ID NO: 564).

[0487] In some embodiments, the targeting moiety comprises any one of the anti-PD-1 antibodies, or fragments thereof, disclosed in US 2011/0271358 and WO 2010/036959, the entire contents of which are hereby incorporated by reference. By way of example, but not by way of limitation, in some embodiments, the antibody or an antigen-binding fragment thereof for use in the methods provided herein comprises a heavy chain comprising one or more amino acid sequences selected from the following sequences in US 2011/0271358: (SEQ ID NO: 565); (SEQ ID NO: 566); (SEQ ID NO: 567); (SEQ ID NO: 568); or (SEQ ID NO: 569); and/or a light chain comprising one or more amino acid sequences selected from the following sequences in US 2011/0271358: (SEQ ID NO: 570); (SEQ ID NO: 571); (SEQ ID NO: 572); or (SEQ ID NO: 573).

[0488] In some embodiments, the present multi-specific FAP binding agent comprises one or more antibodies directed against PD-1, or antibody fragments thereof, selected from TSR-042 (Tesaro, Inc.), REGN2810 (Regeneron Pharmaceuticals, Inc.), PDR001 (Novartis Pharmaceuticals), and BGB-A317 (BeiGene Ltd.)

[0489] In some embodiments, the present multi-specific FAP binding agent has one or more targeting moieties directed against PD-L1.

[0490] In some embodiments, the FAP binding agent has one or more targeting moieties that selectively bind a PD-L1 polypeptide. In some embodiments, the FAP binding agent comprises one or more antibodies, antibody derivatives or formats, peptides or polypeptides, or fusion proteins that selectively bind a PD-L1 polypeptide.

[0491] In some embodiments, the multi-specific FAP binding agent of the present technology comprises a VHH against PD-L1 having a variable domain comprising at least one PD-L1 CDR1, PD-L1 CDR2, and/or PD-L1 CDR3 sequences.

[0492] In some embodiments, the PD-L1 CDR1 sequence is selected from: SEQ ID NO: 574 to SEQ ID NO: 604.

[0493] In some embodiments, the PD-L1 CDR2 sequence is selected from: SEQ ID NO: 605 to SEQ ID NO: 635.

[0494] In some embodiments, the PD-L1 CDR3 sequence is selected from: SEQ ID NO: 636 to SEQ ID NO: 666.

[0495] In some embodiments, the PD-L1 targeting moiety comprises an amino acid sequence selected from the following sequences: 2LIG2: (SEQ ID NO: 667); or 2LIG3: (SEQ ID NO: 668); or 2LIG16: (SEQ ID NO: 669); or 2LIG22: (SEQ ID NO: 670); or 2LIG27: (SEQ ID NO: 671); or 2LIG29: (SEQ ID NO: 672); or 2LIG30: (SEQ ID NO: 673); or 2LIG34: (SEQ ID NO: 674); or 2LIG35: (SEQ ID NO: 675); or 2LIG48: (SEQ ID NO: 676); or 2LIG65: (SEQ ID NO: 677); or 2LIG85: (SEQ ID NO: 678); or 2LIG86: (SEQ ID NO: 679); or 2LIG89: (SEQ ID NO: 680); or 2LIG97: (SEQ ID NO: 681); or 2LIG99: (SEQ ID NO: 682); or 2LIG109: (SEQ ID NO: 683); or 2LIG127: (SEQ ID NO: 684); or 2LIG139: (SEQ ID NO: 685); or 2LIG176: (SEQ ID NO: 686); or 2LIG189: (SEQ ID NO: 687); or 3LIG3: (SEQ ID NO: 688); or 3LIG7: (SEQ ID NO: 689); or 3LIG8: (SEQ ID NO: 690); or 3LIG9: (SEQ ID NO: 691); or 3LIG18: (SEQ ID NO: 692); or 3LIG20: (SEQ ID NO: 693); or 3LIG28: (SEQ ID NO: 694); or 3LIG29: (SEQ ID NO: 695); or 3LIG30: (SEQ ID NO: 696); or 3LIG33: (SEQ ID NO: 697).

[0496] In some embodiments, the PD-L1 targeting moiety comprises an amino acid sequence selected from any one of the above sequences without the terminal histidine tag sequence (i.e., HHHHHH; SEQ ID NO: 43).

[0497] In some embodiment, the targeting moiety comprises the anti-PD-L1 antibody MED14736 (a/k/a durvalumab), or fragments thereof. MED14736 is selective for PD-L1 and blocks the binding of PD-L1 to the PD-1 and CD80 receptors. In some embodiments, the MED14736 and antigen-binding fragments thereof for use in the methods provided herein comprises a heavy chain and a light chain or a heavy chain variable region and a light chain variable region. The sequence of MED14736 is disclosed in WO/2016/06272, the entire contents of which are hereby incorporated by reference. By way of example, but not by way of limitation, in some embodiments, the MED14736 or an antigen-binding fragment thereof for use in the methods provided herein comprises a heavy chain comprising the amino acid sequence of: (SEQ ID NO: 698); and/or a light chain comprising the amino acid sequence of: (SEQ ID NO: 699).

[0498] In some embodiments, the MED14736 or an antigen-binding fragment thereof for use in the methods provided herein comprises a heavy chain variable region comprising the amino acid sequence: (SEQ ID NO: 885); and/or a light chain variable region comprising the amino acid sequence: (SEQ ID NO: 886).

[0499] In some embodiments, the targeting moiety comprises the anti-PD-L1 antibody atezolizumab (a/k/a MPDL3280A, RG7446), or fragments thereof. By way of example, but not by way of limitation, in some embodiments, the atezolizumab or an antigen-binding fragment thereof for use in the methods provided herein comprises a heavy chain comprising the amino acid sequence of: (SEQ ID NO: 887); and/or a light chain comprising the amino acid sequence of: (SEQ ID NO: 888).

[0500] In some embodiments, the targeting moiety comprises the anti-PD-L1 antibody avelumab (a/k/a MSB0010718C), or fragments thereof. By way of example, but not by way of limitation, in some embodiments, the avelumab or an antigen-binding fragment thereof for use in the methods provided herein comprises a heavy chain comprising the amino acid sequence of: (SEQ ID NO: 889); and/or a light chain comprising the amino acid sequence of: (SEQ ID NO: 890).

[0501] In some embodiments, the targeting moiety comprises the anti-PD-L1 antibody BMS-936559 (a/k/a 12A4, MDX-1105), or fragments thereof, disclosed in US 2013/0309250 and WO 2007/005874, the entire disclosures of which are hereby incorporated by reference. By way of example, but not by way of limitation, in some embodiments, the BMS-936559 or an antigen-binding fragment thereof for use in the methods provided herein comprises a heavy chain variable region comprising the amino acid sequence of: (SEQ ID NO: 891); and/or a light chain variable region comprising the amino acid sequence of: (SEQ ID NO: 892).

[0502] In some embodiments, the targeting moiety comprises the anti-PD-L1 antibody 3G10, or fragments thereof, disclosed in US 2013/0309250 and WO 2007/005874, the entire disclosures of which are hereby incorporated by reference. By way of example, but not by way of limitation, in some embodiments, the 3G10 or an antigen-binding fragment thereof for use in the methods provided herein comprises a heavy chain variable region comprising the amino acid sequence of: (SEQ ID NO: 893); and/or a light chain variable region comprising the amino acid sequence of:(SEQ ID NO: 894).

[0503] In some embodiments, the targeting moiety comprises the anti-PD-L1 antibody 10A5, or fragments thereof, disclosed in US 2013/0309250 and WO 2007/005874, the entire disclosures of which are hereby incorporated by reference. By way of example, but not by way of limitation, in some embodiments, the 10A5 or an antigen-binding fragment thereof for use in the methods provided herein comprises a heavy chain variable region comprising the amino acid sequence of: (SEQ ID NO: 895); and/or a light chain variable region comprising the amino acid sequence of: (SEQ ID NO: 896).

[0504] In some embodiments, the targeting moiety comprises the anti-PD-L1 antibody 5F8, or fragments thereof, disclosed in US 2013/0309250 and WO 2007/005874, the entire disclosures of which are hereby incorporated by reference. By way of example, but not by way of limitation, in some embodiments, the 5F8 or an antigen-binding fragment thereof for use in the methods provided herein comprises a heavy chain variable region comprising the amino acid sequence of: (SEQ ID NO: 897); and/or a light chain variable region comprising the amino acid sequence of: (SEQ ID NO: 898).

[0505] In some embodiments, the targeting moiety comprises the anti-PD-L1 antibody 10H10, or fragments thereof, disclosed in US 2013/0309250 and WO 2007/005874, the entire disclosures of which are hereby incorporated by reference. By way of example, but not by way of limitation, in some embodiments, the 10H10 or an antigen-binding fragment thereof for use in the methods provided herein comprises a heavy chain variable region comprising the amino acid sequence of: (SEQ ID NO: 899); and/or a light chain variable region comprising the amino acid sequence of: (SEQ ID NO: 900).

[0506] In some embodiments, the targeting moiety comprises the anti-PD-L1 antibody 1612, or fragments thereof, disclosed in US 2013/0309250 and WO 2007/005874, the entire disclosures of which are hereby incorporated by reference. By way of example, but not by way of limitation, in some embodiments, the 1612 or an antigen-binding fragment thereof for use in the methods provided herein comprises a heavy chain variable region comprising the amino acid sequence of: (SEQ ID NO: 901); and/or a light chain variable region comprising the amino acid sequence of: (SEQ ID NO: 902).

[0507] In some embodiments, the targeting moiety comprises the anti-PD-L1 antibody 7H1, or fragments thereof, disclosed in US 2013/0309250 and WO 2007/005874, the entire disclosures of which are hereby incorporated by reference. By way of example, but not by way of limitation, in some embodiments, the 7H1 or an antigen-binding fragment thereof for use in the methods provided herein comprises a heavy chain variable region comprising the amino acid sequence of: (SEQ ID NO: 903); and/or a light chain variable region comprising the amino acid sequence of: (SEQ ID NO: 904).

[0508] In some embodiments, the targeting moiety comprises the anti-PD-L1 antibody 11E6, or fragments thereof, disclosed in US 2013/0309250 and WO 2007/005874, the entire disclosures of which are hereby incorporated by reference. By way of example, but not by way of limitation, in some embodiments, the 11E6 or an antigen-binding fragment thereof for use in the methods provided herein comprises a heavy chain variable region comprising the amino acid sequence of: (SEQ ID NO: 905); and/or a light chain variable region comprising the amino acid sequence of: (SEQ ID NO: 906).

[0509] In some embodiments, the targeting moiety comprises the anti-PD-L1 antibody 1267, or fragments thereof, disclosed in US 2013/0309250 and WO 2007/005874, the entire disclosures of which are hereby incorporated by reference. By way of example, but not by way of limitation, in some embodiments, the 1267 or an antigen-binding fragment thereof for use in the methods provided herein comprises a heavy chain variable region comprising the amino acid sequence of: (SEQ ID NO: 907); and/or a light chain variable region comprising the amino acid sequence of: (SEQ ID NO: 908).

[0510] In some embodiments, the targeting moiety comprises the anti-PD-L1 antibody 13G4, or fragments thereof, disclosed in US 2013/0309250 and WO 2007/005874, the entire disclosures of which are hereby incorporated by reference. By way of example, but not by way of limitation, in some embodiments, the 13G4 or an antigen-binding fragment thereof for use in the methods provided herein comprises a heavy chain variable region comprising the amino acid sequence of: (SEQ ID NO: 909); and/or a light chain variable region comprising the amino acid sequence of: (SEQ ID NO: 910).

[0511] In some embodiments, the targeting moiety comprises the anti-PD-L1 antibody 1E12, or fragments thereof, disclosed in US 2014/0044738, the entire disclosures of which are hereby incorporated by reference. By way of example, but not by way of limitation, in some embodiments, the 1E12 or an antigen-binding fragment thereof for use in the methods provided herein comprises a heavy chain variable region comprising the amino acid sequence of: (SEQ ID NO: 911);

[0512] and/or a light chain variable region comprising the amino acid sequence of: (SEQ ID NO: 912).

[0513] In some embodiments, the targeting moiety comprises the anti-PD-L1 antibody 1F4, or fragments thereof, disclosed in US 2014/0044738, the entire disclosures of which are hereby incorporated by reference. By way of example, but not by way of limitation, in some embodiments, the 1F4 or an antigen-binding fragment thereof for use in the methods provided herein comprises a heavy chain variable region comprising the amino acid sequence of: (SEQ ID NO: 913); and/or a light chain variable region comprising the amino acid sequence of: (SEQ ID NO: 914).

[0514] In some embodiments, the targeting moiety comprises the anti-PD-L1 antibody 2G11, or fragments thereof, disclosed in US 2014/0044738, the entire disclosures of which are hereby incorporated by reference. By way of example, but not by way of limitation, in some embodiments, the 2G11 or an antigen-binding fragment thereof for use in the methods provided herein comprises a heavy chain variable region comprising the amino acid sequence of: (SEQ ID NO: 700); and/or a light chain variable region comprising the amino acid sequence of: (SEQ ID NO: 701).

[0515] In some embodiments, the targeting moiety comprises the anti-PD-L1 antibody 3B6, or fragments thereof, disclosed in US 2014/0044738, the entire disclosures of which are hereby incorporated by reference. By way of example, but not by way of limitation, in some embodiments, the 3B6 or an antigen-binding fragment thereof for use in the methods provided herein comprises a heavy chain variable region comprising the amino acid sequence of: (SEQ ID NO: 702); and/or a light chain variable region comprising the amino acid sequence of: (SEQ ID NO: 703).

[0516] In some embodiments, the targeting moiety comprises the anti-PD-L1 antibody 3D10, or fragments thereof, disclosed in US 2014/0044738 and WO 2012/145493, the entire disclosures of which are hereby incorporated by reference. By way of example, but not by way of limitation, in some embodiments, the 3D10 or an antigen-binding fragment thereof for use in the methods provided herein comprises a heavy chain variable region comprising the amino acid sequence of: (SEQ ID NO: 704); and/or a light chain variable region comprising the amino acid sequence of: (SEQ ID NO: 705).

[0517] In some embodiments, the targeting moiety comprises any one of the anti-PD-L1 antibodies disclosed in US2011/0271358 and WO 2010/036959, the entire contents of which are hereby incorporated by reference. By way of example, but not by way of limitation, in some embodiments, the antibody or an antigen-binding fragment thereof for use in the methods provided herein comprises a heavy chain comprising one or more amino acid sequences selected from the following sequences in US2011/0271358: (SEQ ID NO: 706); (SEQ ID NO: 707); (SEQ ID NO: 708); (SEQ ID NO: 709); or (SEQ ID NO: 710); and/or a light chain comprising one or more amino acid sequences selected from the following sequences in US2011/0271358: (SEQ ID NO: 711); (SEQ ID NO: 712); (SEQ ID NO: 713); or (SEQ ID NO: 714).

[0518] In some embodiments, the targeting moiety comprises the anti-PD-L1 antibody 2.7A4, or fragments thereof, disclosed in WO 2011/066389, US8,779,108, and US 2014/0356353, the entire disclosures of which are hereby incorporated by reference. By way of example, but not by way of limitation, in some embodiments, the 2.7A4 or an antigen-binding fragment thereof for use in the methods provided herein comprises a heavy chain variable region comprising the amino acid sequence of: (SEQ ID NO: 715); and/or a light chain variable region comprising the amino acid sequence of: (SEQ ID NO: 716).

[0519] In some embodiments, the targeting moiety comprises the anti-PD-L1 antibody 2.9D10, or fragments thereof, disclosed in WO 2011/066389, U.S. Pat. No. 8,779,108, and US 2014/0356353, the entire disclosures of which are hereby incorporated by reference. By way of example, but not by way of limitation, in some embodiments, the 2.9D10 or an antigen-binding fragment thereof for use in the methods provided herein comprises a heavy chain variable region comprising the amino acid sequence of: (SEQ ID NO: 717); and/or a light chain variable region comprising the amino acid sequence of: (SEQ ID NO: 718).

[0520] In some embodiments, the targeting moiety comprises the anti-PD-L1 antibody 2.14H9, or fragments thereof, disclosed in WO 2011/066389, U.S. Pat. No. 8,779,108, and US 2014/0356353, the entire disclosures of which are hereby incorporated by reference. By way of example, but not by way of limitation, in some embodiments, the 2.14H9 or an antigen-binding fragment thereof for use in the methods provided herein comprises a heavy chain variable region comprising the amino acid sequence of: (SEQ ID NO: 719); and/or a light chain variable region comprising the amino acid sequence of: (SEQ ID NO: 720).

[0521] In some embodiments, the targeting moiety comprises the anti-PD-L1 antibody 2.20A8, or fragments thereof, disclosed in WO 2011/066389, U.S. Pat. No. 8,779,108, and US 2014/0356353, the entire disclosures of which are hereby incorporated by reference. By way of example, but not by way of limitation, in some embodiments, the 2.20A8 or an antigen-binding fragment thereof for use in the methods provided herein comprises a heavy chain variable region comprising the amino acid sequence of: (SEQ ID NO: 721); and/or a light chain variable region comprising the amino acid sequence of: (SEQ ID NO: 722).

[0522] In some embodiments, the targeting moiety comprises the anti-PD-L1 antibody 3.15G8, or fragments thereof, disclosed in WO 2011/066389, U.S. Pat. No. 8,779,108, and US 2014/0356353, the entire disclosures of which are hereby incorporated by reference. By way of example, but not by way of limitation, in some embodiments, the 3.15G8 or an antigen-binding fragment thereof for use in the methods provided herein comprises a heavy chain variable region comprising the amino acid sequence of: (SEQ ID NO: 723); and/or a light chain variable region comprising the amino acid sequence of: (SEQ ID NO: 724).

[0523] In some embodiments, the targeting moiety comprises the anti-PD-L1 antibody 3.18G1, or fragments thereof, disclosed in WO 2011/066389, U.S. Pat. No. 8,779,108, and US 2014/0356353, the entire disclosures of which are hereby incorporated by reference. By way of example, but not by way of limitation, in some embodiments, the 3.18G1 or an antigen-binding fragment thereof for use in the methods provided herein comprises a heavy chain variable region comprising the amino acid sequence of: (SEQ ID NO: 725); and/or a light chain variable region comprising the amino acid sequence of: (SEQ ID NO: 726).

[0524] In some embodiments, the targeting moiety comprises the anti-PD-L1 antibody 2.7A4OPT, or fragments thereof, disclosed in WO 2011/066389, U.S. Pat. No. 8,779,108, and US 2014/0356353, the entire disclosures of which are hereby incorporated by reference. By way of example, but not by way of limitation, in some embodiments, the 2.7A4OPT or an antigen-binding fragment thereof for use in the methods provided herein comprises a heavy chain variable region comprising the amino acid sequence of: (SEQ ID NO: 727); and/or a light chain variable region comprising the amino acid sequence of: (SEQ ID NO: 728).

[0525] In some embodiments, the targeting moiety comprises the anti-PD-L1 antibody 2.14H90PT, or fragments thereof, as disclosed in WO 2011/066389, U.S. Pat. No. 8,779,108, and US 2014/0356353, the entire disclosures of which are hereby incorporated by reference. By way of example, but not by way of limitation, in some embodiments, the 2.14H90PT or an antigen-binding fragment thereof for use in the methods provided herein comprises a heavy chain variable region comprising the amino acid sequence of: (SEQ ID NO: 729); and/or a light chain variable region comprising the amino acid sequence of: (SEQ ID NO: 730).

[0526] In some embodiments, the targeting moiety comprises any one of the anti-PD-L1 antibodies disclosed in WO 2016/061142, the entire contents of which are hereby incorporated by reference. By way of example, but not by way of limitation, in some embodiments, the antibody or an antigen-binding fragment thereof for use in the methods provided herein comprises a heavy chain comprising one or more amino acid sequences selected from the following sequences in WO 2016/061142: (SEQ ID NO: 731); (SEQ ID NO: 732); (SEQ ID NO: 733); (SEQ ID NO: 734); (SEQ ID NO: 735); (SEQ ID NO: 736); (SEQ ID NO: 737); (SEQ ID NO: 738); or (SEQ ID NO: 739); and/or a light chain comprising one or more amino acid sequences selected from the following sequences in WO 2016/061142: (SEQ ID NO: 740); (SEQ ID NO: 741); (SEQ ID NO: 742); (SEQ ID NO: 743); (SEQ ID NO: 744); (SEQ ID NO: 745); (SEQ ID NO: 746); (SEQ ID NO: 747); or (SEQ ID NO: 748).

[0527] In some embodiments, the targeting moiety comprises any one of the anti-PD-L1 antibodies disclosed in WO 2016/022630, the entire contents of which are hereby incorporated by reference. By way of example, but not by way of limitation, in some embodiments, the antibody or an antigen-binding fragment thereof for use in the methods provided herein comprises a heavy chain comprising one or more amino acid sequences selected from the following sequences in WO 2016/022630: (SEQ ID NO: 749); (SEQ ID NO: 750); (SEQ ID NO: 751); (SEQ ID NO: 752); (SEQ ID NO: 753); (SEQ ID NO: 754); (SEQ ID NO: 755); (SEQ ID NO: 756); (SEQ ID NO: 757); (SEQ ID NO: 758); (SEQ ID NO: 759); (SEQ ID NO: 760); and/or a light chain comprising one or more amino acid sequences selected from the following sequences in WO 2016/022630: (SEQ ID NO: 761); (SEQ ID NO: 762); (SEQ ID NO: 763); (SEQ ID NO: 764); (SEQ ID NO: 765); (SEQ ID NO: 766); (SEQ ID NO: 767); (SEQ ID NO: 768); (SEQ ID NO: 769); (SEQ ID NO: 770); (SEQ ID NO: 771); and (SEQ ID NO: 772).

[0528] In some embodiments, the targeting moiety comprises any one of the anti-PD-L1 antibodies disclosed in WO 2015/112900, the entire contents of which are hereby incorporated by reference. By way of example, but not by way of limitation, in some embodiments, the antibody or an antigen-binding fragment thereof for use in the methods provided herein comprises a heavy chain comprising one or more amino acid sequences selected from the following sequencs in WO 2015/112900: (SEQ ID NO: 773); (SEQ ID NO: 774); (SEQ ID NO: 775); or (SEQ ID NO: 776); and/or a light chain comprising one or more amino acid sequences selected from the following sequences in WO 2015/112900: (SEQ ID NO: 777); (SEQ ID NO: 778); (SEQ ID NO: 779); (SEQ ID NO: 780); (SEQ ID NO: 781); (SEQ ID NO: 782); (SEQ ID NO: 783); (SEQ ID NO: 784); or (SEQ ID NO: 785).

[0529] In some embodiments, the targeting moiety comprises any one of the anti-PD-L1 antibodies disclosed in WO 2010/077634 and U.S. Pat. No. 8,217,149, the entire disclosures of which are hereby incorporated by reference. By way of example, but not by way of limitation, in some embodiments, the anti-PD-L1 antibody or an antigen-binding fragment thereof for use in the methods provided herein comprises a heavy chain region comprising the amino acid sequence of: (SEQ ID NO: 786); and/or a light chain variable region comprising the amino acid sequence of: (SEQ ID NO: 787).

[0530] In some embodiments, the targeting moiety comprises any one of the anti-PD-L1 antibodies obtainable from the hybridoma accessible under CNCM deposit numbers CNCM 1-4122, CNCM 1-4080 and CNCM 1-4081 disclosed in US 20120039906, the entire disclosures of which are hereby incorporated by reference.

[0531] In some embodiments, the targeting moiety comprises a VHH directed against PD-L1 disclosed, in U.S. Pat. No. 8,907,065 and WO 2008/071447, the entire disclosures of which are hereby incorporated by reference. By way of example, but not by way of limitation, in some embodiments, the VHHs against PD-L1 comprise one or more of the following sequences in US 8,907,065: (SEQ ID NO: 788); (SEQ ID NO: 789); (SEQ ID NO: 790); (SEQ ID NO: 791); (SEQ ID NO: 792); and (SEQ ID NO: 793).

[0532] In some embodiments, the present multi-specific FAP binding agent has one or more targeting moieties directed against PD-L2. In some embodiments, the FAP binding agent has one or more targeting moieties that selectively bind a PD-L2 polypeptide. In some embodiments, the FAP binding agent comprises one or more antibodies, antibody derivatives or formats, peptides or polypeptides, or fusion proteins that selectively bind a PD-L2 polypeptide.

[0533] In some embodiments, the targeting moiety comprises a VHH directed against PD-L2 disclosed in U.S. Pat. No. 8,907,065 and WO 2008/071447, the entire disclosures of which are hereby incorporated by reference. By way of example, but not by way of limitation, in some embodiments, the VHHs against PD-1 comprise one or more of the following sequences in U.S. Pat. No. 8,907,065: (SEQ ID NO: 794); (SEQ ID NO: 795); (SEQ ID NO: 796); (SEQ ID NO: 797); (SEQ ID NO: 798); (SEQ ID NO: 799); and (SEQ ID NO: 800).

[0534] In some embodiments, the targeting moiety comprises any one of the anti-PD-L2 antibodies disclosed in US2011/0271358 and WO2010/036959, the entire contents of which are hereby incorporated by reference. By way of example, but not by way of limitation, in some embodiments, the antibody or an antigen-binding fragment thereof for use in the methods provided herein comprises a heavy chain comprising one or more amino acid sequences selected from the following sequences in US 2011/0271358: (SEQ ID NO: 801); (SEQ ID NO: 802); (SEQ ID NO: 803); (SEQ ID NO: 804); or (SEQ ID NO: 805); and/or a light chain comprising one or more amino acid sequences selected from the following sequences in US 2011/0271358: (SEQ ID NO: 806); (SEQ ID NO: 807); (SEQ ID NO: 808); or (SEQ ID NO: 809).

[0535] In some embodiments, the targeting moieties of the present technology comprises a sequence that targets PD-1, PD-L1, and/or PD-L2 that is at least about 60%, at least about 61%, at least about 62%, at least about 63%, at least about 64%, at least about 65%, at least about 66%, at least about 67%, at least about 68%, at least about 69%, at least about 70%, at least about 71%, at least about 72%, at least about 73%, at least about 74%, at least about 75%, at least about 76%, at least about 77%, at least about 78%, at least about 79%, at least about 80%, at least about 81%, at least about 82%, at least about 83%, at least about 84%, at least about 85%, at least about 86%, at least about 87%, at least about 88%, at least about 89%, at least about 90%, at least about 91%, at least about 92%, at least about 93%, at least about 94%, at least about 95%, at least about 96%, at least about 97%, at least about 98%, at least about 99%, or 100% identical to any of the sequences disclosed herein (e.g. about 60%, or about 61%, or about 62%, or about 63%, or about 64%, or about 65%, or about 66%, or about 67%, or about 68%, or about 69%, or about 70%, or about 71%, or about 72%, or about 73%, or about 74%, or about 75%, or about 76%, or about 77%, or about 78%, or about 79%, or about 80%, or about 81%, or about 82%, or about 83%, or about 84%, or about 85%, or about 86%, or about 87%, or about 88%, or about 89%, or about 90%, or about 91%, or about 92%, or about 93%, or about 94%, or about 95%, or about 96%, or about 97%, or about 98%, about 99% or about 100% sequence identity with any of the sequences disclosed herein).

[0536] In some embodiments, the targeting moieties of the present technology comprise any combination of heavy chain, light chain, heavy chain variable region, light chain variable region, complementarity determining region (CDR), and framework region sequences that target PD-1, PD-L1, and/or PD-L2 as disclosed herein.

[0537] In some embodiments, the targeting moiety is one or more antibodies, antibody derivatives or formats, peptides or polypeptides, or fusion proteins that selectively bind or target PD-1, PD-L1 and/or PD-L2 disclosed in WO 2011/066389, US 2008/0025980, US 2013/0034559, U.S. Pat. No. 8,779,108, US 2014/0356353, U.S. Pat. No. 8,609,089, US 2010/028330, US 2012/0114649, WO 2010/027827, WO 2011,/066342, U.S. Pat. No. 8,907,065, WO 2016/062722, WO 2009/101611, WO2010/027827, WO 2011/066342, WO 2007/005874 , WO 2001/014556, US2011/0271358, WO 2010/036959, WO 2010/077634, U.S. Pat. No. 8,217,149, US 2012/0039906, WO 2012/145493, US 2011/0318373, U.S. Pat. No. 8,779,108, US 20140044738, WO 2009/089149, WO 2007/00587, WO 2016061142, WO 2016,02263, WO 2010/077634, and WO 2015/112900, the entire disclosures of which are hereby incorporated by reference.

[0538] In some embodiments, the multi-specific FAP binding agent of the present technology comprises a targeting moiety having an antigen recognition domain that specifically binds to XCR1, e.g. on dendritic cells. In some embodiments, the multi-specific FAP binding agent of the present technology comprises a targeting moiety having an antigen recognition domain that comprise all of or part of XCL1.

[0539] In some embodiments, the multi-specific FAP binding agents have targeting moieties having recognition domains, which specifically bind to a target (e.g. antigen, receptor) that is part of a non-cellular structure. In some embodiments, the antigen or receptor is not an integral component of an intact cell or cellular structure. In some embodiments, the antigen or receptor is an extracellular antigen or receptor. In some embodiments, the target is a non-proteinaceous, non-cellular marker, including, without limitation, nucleic acids, inclusive of DNA or RNA, such as, for example, DNA released from necrotic tumor cells or extracellular deposits such as cholesterol.

[0540] In some embodiments, the target (e.g. antigen, receptor) of interest is part of the non-cellular component of the stroma or the extracellular matrix (ECM) or the markers associated therewith. As used herein, stroma refers to the connective and supportive framework of a tissue or organ. Stroma may include a compilation of cells such as fibroblasts/myofibroblasts, glial, epithelia, fat, immune, vascular, smooth muscle, and immune cells along with the extracellular matrix (ECM) and extracellular molecules. In some embodiments, the target (e.g. antigen, receptor) of interest is part of the non-cellular component of the stroma such as the extracellular matrix and extracellular molecules. As used herein, the ECM refers to the non-cellular components present within all tissues and organs. The ECM is composed of a large collection of biochemically distinct components including, without limitation, proteins, glycoproteins, proteoglycans, and polysaccharides. These components of the ECM are usually produced by adjacent cells and secreted into the ECM via exocytosis. Once secreted, the ECM components often aggregate to form a complex network of macromolecules. In some embodiments, the chimeric protein or Fc-based chimeric protein complex of the present technology comprises a targeting moiety that recognizes a target (e.g., an antigen or receptor or non-proteinaceous molecule) located on any component of the ECM. Illustrative components of the ECM include, without limitation, the proteoglycans, the non-proteoglycan polysaccharides, fibers, and other ECM proteins or ECM non-proteins, e.g. polysaccharides and/or lipids, or ECM associated molecules (e.g. proteins or non-proteins, e.g. polysaccharides, nucleic acids and/or lipids).

[0541] In some embodiments, the targeting moiety recognizes a target (e.g. antigen, receptor) on ECM proteoglycans. Proteoglycans are glycosylated proteins. The basic proteoglycan unit includes a core protein with one or more covalently attached glycosaminoglycan (GAG) chains. Proteoglycans have a net negative charge that attracts positively charged sodium ions (Na+), which attracts water molecules via osmosis, keeping the ECM and resident cells hydrated. Proteoglycans may also help to trap and store growth factors within the ECM. Illustrative proteoglycans that may be targeted by the chimeric proteins or Fc-based chimeric protein complex of the present technology include, but are not limited to, heparan sulfate, chondroitin sulfate, and keratan sulfate. In an embodiment, the targeting moiety recognizes a target (e.g. antigen, receptor) on non-proteoglycan polysaccharides such as hyaluronic acid.

[0542] In some embodiments, the targeting moiety recognizes a target (e.g. antigen, receptor) on ECM fibers. ECM fibers include collagen fibers and elastin fibers. In some embodiments, the targeting moiety recognizes one or more epitopes on collagens or collagen fibers. Collagens are the most abundant proteins in the ECM. Collagens are present in the ECM as fibrillar proteins and provide structural support to resident cells. In one or more embodiments, the targeting moiety recognizes and binds to various types of collagens present within the ECM including, without limitation, fibrillar collagens (types I, II, III, V, XI), facit collagens (types IX, XII, XIV), short chain collagens (types VIII, X), basement membrane collagens (type IV), and/or collagen types VI, VII, or XIII. Elastin fibers provide elasticity to tissues, allowing them to stretch when needed and then return to their original state. In some embodiments, the target moiety recognizes one or more epitopes on elastins or elastin fibers.

[0543] In some embodiments, the targeting moiety recognizes one or more ECM proteins including, but not limited to, a tenascin, a fibronectin, a fibrin, a laminin, or a nidogen/entactin.

[0544] In some embodiments, the targeting moiety recognizes and binds to tenascin. The tenascin (TN) family of glycoproteins includes at least four members, tenascin-C, tenascin-R, tenascin-X, and tenascin W. The primary structures of tenascin proteins include several common motifs ordered in the same consecutive sequence: amino-terminal heptad repeats, epidermal growth factor (EGF)-like repeats, fibronectin type III domain repeats, and a carboxyl-terminal fibrinogen-like globular domain. Each protein member is associated with typical variations in the number and nature of EGF-like and fibronectin type III repeats. Isoform variants also exist particularly with respect to tenascin-C. Over 27 splice variants and/or isoforms of tenascin-C are known. In a particular embodiment, the targeting moiety recognizes and binds to tenascin-CA1. Similarly, tenascin-R also has various splice variants and isoforms. Tenascin-R usually exists as dimers or trimers. Tenascin-X is the largest member of the tenascin family and is known to exist as trimers. Tenascin-W exists as trimers. In some embodiments, the targeting moiety recognizes one or more epitopes on a tenascin protein. I n some embodiments, the targeting moiety recognizes the monomeric and/or the dimeric and/or the trimeric and/or the hexameric forms of a tenascin protein.

[0545] In an embodiment, the targeting moieties recognize and bind to fibronectin. Fibronectins are glycoproteins that connect cells with collagen fibers in the ECM, allowing cells to move through the ECM. Upon binding to integrins, fibronectins unfold to form functional dimers. In some embodiments, the targeting moiety recognizes the monomeric and/or the dimeric forms of fibronectin. In some embodiments, the targeting moiety recognizes one or more epitopes on fibronectin. By way of example, but not by way of limitation, in some embodiments, the targeting moiety recognizes fibronectin extracellular domain A (EDA) or fibronectin extracellular domain B (EDB). Elevated levels of EDA are associated with various diseases and disorders including psoriasis, rheumatoid arthritis, diabetes, and cancer. In some embodiments, the targeting moiety recognizes fibronectin that contains the EDA isoform and may be utilized to target the chimeric protein or Fc-based chimeric protein complex to diseased cells including cancer cells. In some embodiments, the targeting moiety recognizes fibronectin that contains the EDB isoform. In some embodiments, such targeting moieties may be utilized to target the chimeric protein or Fc-based chimeric protein complex to tumor cells including the tumor neovasculature.

[0546] In some embodiments, the targeting moiety recognizes and binds to fibrin. Fibrin is another protein substance often found in the matrix network of the ECM. Fibrin is formed by the action of the protease thrombin on fibrinogen that causes the fibrin to polymerize. In some embodiments, the targeting moiety recognizes one or more epitopes on fibrin. In some embodiments, the targeting moiety recognizes the monomeric as well as the polymerized forms of fibrin.

[0547] In some embodiments, the targeting moiety recognizes and binds to laminin. Laminin is a major component of the basal lamina, which is a protein network foundation for cells and organs. Laminins are heterotrimeric proteins that contain an a-chain, a 3-chain, and a y-chain. In some embodiments, the targeting moiety recognizes one or more epitopes on laminin. In some embodiments, the targeting moiety recognizes the monomeric, the dimeric as well as the trimeric forms of laminin.

[0548] In some embodiments, the targeting moiety recognizes and binds to a nidogen or entactin. Nidogens/entactins are a family of highly conserved, sulfated glycoproteins. They make up the major structural component of the basement membranes and function to link laminin and collagen IV networks in basement membranes. Members of this family include nidogen-1 and nidogen-2. In some embodiments, the targeting moiety recognizes an epitope on nidogen-1 and/or nidogen-2.

[0549] In some embodiments, the targeting moiety comprises an antigen recognition domain that recognizes an epitope present on any of the targets described herein. In some embodiments, the antigen-recognition domain recognizes one or more linear epitopes present on the protein. As used herein, a linear epitope refers to any continuous sequence of amino acids present on the protein. In another embodiment, the antigen-recognition domain recognizes one or more conformational epitopes present on the protein.

[0550] As used herein, a conformation epitope refers to one or more sections of amino acids (which may be discontinuous) that form a three-dimensional surface with features and/or shapes and/or tertiary structures capable of being recognized by an antigen recognition domain.

[0551] In some embodiments, the targeting moiety binds to the full-length and/or mature forms and/or isoforms and/or splice variants and/or fragments and/or any other naturally occurring or synthetic analogs, variants, or mutants of any of the described herein. In some embodiments, the targeting moiety may bind to any forms of the proteins described herein, including monomeric, dimeric, trimeric, tetrameric, heterodimeric, multimeric and associated forms. In some embodiments, the targeting moiety may bind to any post-translationally modified forms of the proteins described herein, such as glycosylated and/or phosphorylated forms.

[0552] In some embodiments, the targeting moiety comprises an antigen recognition domain that recognizes extracellular molecules such as DNA. In some embodiments, the targeting moiety comprises an antigen recognition domain that recognizes DNA. In some embodiments, the DNA is shed into the extracellular space from necrotic or apoptotic tumor cells or other diseased cells.

[0553] In some embodiments, the targeting moiety comprises an antigen recognition domain that recognizes one or more non-cellular structures associated with atherosclerotic plaques. Two types of atherosclerotic plaques are known. The fibro-lipid (fibro-fatty) plaque is characterized by an accumulation of lipid-laden cells underneath the intima of the arteries. Beneath the endothelium there is a fibrous cap covering the atheromatous core of the plaque. The core includes lipid-laden cells (macrophages and smooth muscle cells) with elevated tissue cholesterol and cholesterol ester content, fibrin, proteoglycans, collagen, elastin, and cellular debris. In advanced plaques, the central core of the plaque usually contains extracellular cholesterol deposits (released from dead cells), which form areas of cholesterol crystals with empty, needle-like clefts. At the periphery of the plaque are younger foamy cells and capillaries. A fibrous plaque is also localized under the intima, within the wall of the artery resulting in thickening and expansion of the wall and, sometimes, spotty localized narrowing of the lumen with some atrophy of the muscular layer. The fibrous plaque contains collagen fibers (eosinophilic), precipitates of calcium (hematoxylinophilic) and lipid-laden cells. In some embodiments, the targeting moiety recognizes and binds to one or more of the non-cellular components of these plaques such as the fibrin, proteoglycans, collagen, elastin, cellular debris, and calcium or other mineral deposits or precipitates. In some embodiments, the cellular debris is a nucleic acid, e.g. DNA or RNA, released from dead cells.

[0554] In some embodiments, the targeting moiety comprises an antigen recognition domain that recognizes one or more non-cellular structures found in the brain plaques associated with neurodegenerative diseases. In some embodiments, the targeting moiety recognizes and binds to one or more non-cellular structures located in the amyloid plaques found in the brains of patients with Alzheimer's disease. For example, the targeting moiety may recognize and bind to the peptide amyloid beta, which is a major component of the amyloid plaques. In some embodiments, the targeting moiety recognizes and binds to one or more non-cellular structures located in the brains plaques found in patients with Huntington's disease. In some embodiments, the targeting moiety recognizes and binds to one or more non-cellular structures found in plaques associated with other neurodegenerative or musculoskeletal diseases such as Lewy body dementia and inclusion body myositis.

[0555] Linkers and Functional Groups

[0556] In some embodiments, the FAP binding agent may include one or more functional groups, residues, or moieties. In some embodiments, the one or more functional groups, residues, or moieties are attached or genetically fused to any of the signaling agents or targeting moieties described herein. In some embodiments, such functional groups, residues or moieties confer one or more desired properties or functionalities to the FAP binding agent of the present technology. Examples of such functional groups and of techniques for introducing them into the FAP binding agent are known in the art, for example, see Remington's Pharmaceutical Sciences, 16th ed., Mack Publishing Co., Easton, Pa. (1980).

[0557] In some embodiments, the FAP binding agent may by conjugated and/or fused with another agent to extend half-life or otherwise improve pharmacodynamic and pharmacokinetic properties. In some embodiments, the FAP binding agent may be fused or conjugated with one or more of PEG, XTEN (e.g., as rPEG), polysialic acid (POLYXEN), albumin (e.g., human serum albumin or HAS), elastin-like protein (ELP), PAS, HAP, GLK, CTP, transferrin, and the like. In some embodiments, each of the individual chimeric proteins or Fc-based chimeric protein complexes is fused to one or more of the agents described in BioDrugs (2015) 29:215-239, the entire contents of which are hereby incorporated by reference.

[0558] In some embodiments, the functional groups, residues, or moieties comprise a suitable pharmacologically acceptable polymer, such as poly(ethyleneglycol) (PEG) or derivatives thereof (such as methoxypoly(ethyleneglycol) or mPEG). In some embodiments, attachment of the PEG moiety increases the half-life and/or reduces the immunogenecity of the FAP binding protein. Generally, any suitable form of pegylation can be used, such as the pegylation used in the art for antibodies and antibody fragments (including but not limited to single domain antibodies such as VHHs); see, for example, Chapman, Nat. Biotechnol., 54, 531-545 (2002); by Veronese and Harris, Adv. Drug Deliv. Rev. 54, 453-456 (2003), by Harris and Chess, Nat. Rev. Drug. Discov., 2, (2003) and in WO04060965, the entire contents of which are hereby incorporated by reference. Various reagents for pegylation of proteins are also commercially available, for example, from Nektar Therapeutics, USA. In some embodiments, site-directed pegylation is used, in particular via a cysteine-residue (see, for example, Yang et al., Protein Engineering, 16, 10, 761-770 (2003), the entire contents of which is hereby incorporated by reference). For example, for this purpose, PEG may be attached to a cysteine residue that naturally occurs in the FAP binding agent of the present technology. In some embodiments, the FAP binding agent of the present technology is modified so as to suitably introduce one or more cysteine residues for attachment of PEG, or an amino acid sequence comprising one or more cysteine residues for attachment of PEG may be fused to the amino- and/or carboxy-terminus of the FAP binding agent, using techniques known in the art.

[0559] In some embodiments, the functional groups, residues, or moieties comprise N-linked or 0-linked glycosylation. In some embodiments, the N-linked or 0-linked glycosylation is introduced as part of a co-translational and/or post-translational modification.

[0560] In some embodiments, the functional groups, residues, or moieties comprise one or more detectable labels or other signal-generating groups or moieties. Suitable labels and techniques for attaching, using and detecting them are known in the art and, include, but are not limited to, fluorescent labels (such as fluorescein, isothiocyanate, rhodamine, phycoerythrin, phycocyanin, allophycocyanin, o-phthaldehyde, and fluorescamine and fluorescent metals such as Eu or others metals from the lanthanide series), phosphorescent labels, chemiluminescent labels or bioluminescent labels (such as luminal, isoluminol, theromatic acridinium ester, imidazole, acridinium salts, oxalate ester, dioxetane or GFP and its analogs), radio-isotopes, metals, metals chelates or metallic cations or other metals or metallic cations that are particularly suited for use in vivo, in vitro, or in situ diagnosis and imaging, as well as chromophores and enzymes (such as malate dehydrogenase, staphylococcal nuclease, delta-V-steroid isomerase, yeast alcohol dehydrogenase, alpha-glycerophosphate dehydrogenase, triose phosphate isomerase, biotinavidin peroxidase, horseradish peroxidase, alkaline phosphatase, asparaginase, glucose oxidase, beta-galactosidase, ribonuclease, urease, catalase, glucose-VI-phosphate dehydrogenase, glucoamylase and acetylcholine esterase). Other suitable labels include moieties that can be detected using NMR or ESR spectroscopy. Such labeled VHHs and polypeptides of the present technology may, for example, be used for in vitro, in vivo, or in situ assays (including immunoassays known per se such as ELISA, RIA, EIA and other “sandwich assays,” etc.) as well as in vivo diagnostic and imaging purposes, depending on the choice of the specific label.

[0561] In some embodiments, the functional groups, residues, or moieties comprise a tag that is attached or genetically fused to the FAP binding agent. In some embodiments, the FAP binding agent may include a single tag or multiple tags. The tag for example is a peptide, sugar, or DNA molecule that does not inhibit or prevent binding of the FAP binding agent to FAP or any other antigen of interest such as tumor antigens. In some embodiments, the tag is at least about: three to five amino acids long, five to eight amino acids long, eight to twelve amino acids long, twelve to fifteen amino acids long, or fifteen to twenty amino acids long. Illustrative tags are described for example, in U.S. Patent Publication No. US2013/0058962. In some embodiment, the tag is an affinity tag such as glutathione-S-transferase (GST) and histidine (His) tag. In an embodiment, the FAP binding agent comprises a His tag.

[0562] In some embodiments, the functional groups, residues, or moieties comprise a chelating group, for example, to chelate one of the metals or metallic cations. By way of example, but not by way of limitation, in some embodiments, the chelating groups are diethyl-enetriaminepentaacetic acid (DTPA) or ethylenediaminetetraacetic acid (EDTA).

[0563] In some embodiments, the functional groups, residues, or moieties comprise a functional group that is one part of a specific binding pair, such as the biotin-(strept)avidin binding pair. Such a functional group may be used to link the FAP binding agent of the present technology to another protein, polypeptide or chemical compound that is bound to the other half of the binding pair, i.e., through formation of the binding pair. For example, in some embodiments, a FAP binding agent of the present technology may be conjugated to biotin, and linked to another protein, polypeptide, compound or carrier conjugated to avidin or streptavidin. For example, such a conjugated FAP binding agent may be used as a reporter, for example, in a diagnostic system where a detectable signal-producing agent is conjugated to avidin or streptavidin. Such binding pairs may, for example, also be used to bind the FAP binding agent to a carrier, including carriers suitable for pharmaceutical purposes. One non-limiting example are the liposomal formulations described by Cao and Suresh, Journal of Drug Targeting, 8, 4, 257 (2000). Such binding pairs may also be used to link a therapeutically active agent to the FAP binding agent of the present technology.

[0564] In some embodiments, the present FAP binding agent optionally comprises one or more linkers. In some embodiments, the FAP binding agent includes a linker that connects each binding region and/or targeting moieties. In some embodiments, the FAP binding agent includes a linker that connects each signaling agent and targeting moiety (or, if more than one targeting moiety, a signaling agent to one of the targeting moieties). I n some embodiments, the linker may be utilized to link various functional groups, residues, or moieties as described herein to the FAP binding agent. In some embodiments, the linker is a single amino acid or a plurality of amino acids that does not affect or reduce the stability, orientation, binding, neutralization, and/or clearance characteristics of the binding regions and the binding protein. In some embodiments, the linker is selected from a peptide, a protein, a sugar, or a nucleic acid.

[0565] In some embodiments, the present FAP binding agent comprises a linker connecting the targeting moiety and the signaling agent. In other embodiments, the Fc-based chimeric protein complex comprises a linker connecting the targeting moiety to the Fc domain or a linker connecting the signaling moiety to the Fc domain. In some embodiments, the present chimeric protein or Fc-based chimeric protein complex comprises a linker within the signaling agent (e.g. in the case of single chain TNF, which can comprise two linkers to yield a trimer).

[0566] The present technology contemplates the use of a variety of linker sequences. In some embodiments, the linker may be derived from naturally-occurring multi-domain proteins or are empirical linkers as described, for example, in Chichili et al., (2013), Protein Sci. 22(2):153-167, Chen et al., (2013), Adv Drug Deliv Rev. 65(10):1357-1369, the entire contents of which are hereby incorporated by reference. In some embodiments, the linker may be designed using linker designing databases and computer programs such as those described in Chen et al., (2013), Adv Drug Deliv Rev. 65(10):1357-1369 and Crasto et al., (2000), Protein Eng. 13(5):309-312, the entire contents of which are hereby incorporated by reference. I n some embodiments, the linker may be functional. For example, without limitation, the linker may function to improve the folding and/or stability, improve the expression, improve the pharmacokinetics, and/or improve the bioactivity of the present FAP binding agent.

[0567] In some embodiments, the linker is a polypeptide. In some embodiments, the linker is less than about 100 amino acids long. For example, in some embodiments, the linker is less than about 100, about 95, about 90, about 85, about 80, about 75, about 70, about 65, about 60, about 55, about 50, about 45, about 40, about 35, about 30, about 25, about 20, about 19, about 18, about 17, about 16, about 15, about 14, about 13, about 12, about 11, about 10, about 9, about 8, about 7, about 6, about 5, about 4, about 3, or about 2 amino acids long. In some embodiments, the linker is a polypeptide. In some embodiments, the linker is greater than about 100 amino acids long. For example, in some embodiments, the linker is greater than about 100, about 95, about 90, about 85, about 80, about 75, about 70, about 65, about 60, about 55, about 50, about 45, about 40, about 35, about 30, about 25, about 20, about 19, about 18, about 17, about 16, about 15, about 14, about 13, about 12, about 11, about 10, about 9, about 8, about 7, about 6, about 5, about 4, about 3, or about 2 amino acids long. In some embodiments, the linker is flexible. I n another embodiment, the linker is rigid.

[0568] In some embodiments, the linker length allows for efficient binding of a targeting moiety and the signaling agent to their receptors. For instance, in some embodiments, the linker length allows for efficient binding of one of the targeting moieties and the signaling agent to receptors on the same cell as well as the efficient binding of the other targeting moiety to another cell. Illustrative pairs of cells are provided elsewhere herein.

[0569] In some embodiments, the linker length is at least equal to the minimum distance between the binding sites of one of the targeting moieties and the signaling agent to receptors on the same cell. In some embodiments, the linker length is at least twice, or three times, or four times, or five times, or ten times, or twenty times, or 25 times, or 50 times, or one hundred times, or more the minimum distance between the binding sites of one of the targeting moieties and the signaling agent to receptors on the same cell.

[0570] In some embodiments, a linker connects the two targeting moieties to each other and this linker has a short length and a linker connects a targeting moiety and a signaling agent this linker is longer than the linker connecting the two targeting moieties. For example, in some embodiments, the difference in amino acid length between the linker connecting the two targeting moieties and the linker connecting a targeting moiety and a signaling agent may be about 100, about 95, about 90, about 85, about 80, about 75, about 70, about 65, about 60, about 55, about 50, about 45, about 40, about 35, about 30, about 25, about 20, about 19, about 18, about 17, about 16, about 15, about 14, about 13, about 12, about 11, about 10, about 9, about 8, about 7, about 6, about 5, about 4, about 3, or about 2 amino acids. In some embodiments, the linker is flexible. In another embodiment, the linker is rigid.

[0571] In some embodiments, the linker is substantially comprised of glycine and serine residues (e.g. about 30%, or about 40%, or about 50%, or about 60%, or about 70%, or about 80%, or about 90%, or about 95%, or about 97% glycines and serines). For example, in some embodiments, the linker is (Gly4Ser)n, where n is from about 1 to about 8, e.g. 1, 2, 3, 4, 5, 6, 7, or 8 (SEQ ID NO: 810 to SEQ ID NO: 817). In some embodiments, the linker sequence is GGSGGSGGGGSGGGGS (SEQ ID NO: 818). In some embodiments, the linkers include, but are not limited to, linkers having the sequence LE, GGGGS (SEQ ID NO: 810), (GGGGS)n (n=1-4) (SEQ ID NO: 810-813), (Gly)8 (SEQ ID NO: 819), (Gly)6 (SEQ ID NO: 820), (EAAAK)n (n=1-3) (SEQ ID NO: 821-823):, A(EAAAK)nA (n =2-5) (SEQ ID NO: 824-827), AEAAAKEAAAKA (SEQ ID NO: 824), A(EAAAK)4ALEA(EAAAK)4A (SEQ ID NO: 828), PAPAP (SEQ ID NO: 829), KESGSVSSEQLAQFRSLD (SEQ ID NO: 830), EGKSSGSGSESKST (SEQ ID NO: 831), GSAGSAAGSGEF (SEQ ID NO: 832), and (XP)n, with X designating any amino acid, e.g., Ala, Lys, or Glu. In some embodiments, the linker is GGS.

[0572] In some embodiments, the linker is one or more of GGGSE (SEQ ID NO: 833), GSESG (SEQ ID NO: 834), GSEGS (SEQ ID NO: 835), GEGGSGEGSSGEGSSSEGGGSEGGGSEGGGSEGGS (SEQ ID NO: 836), and a linker of randomly placed G, S, and E every four amino acid intervals.

[0573] In some embodiments, the linker is a hinge region of an antibody (e.g., of IgG, IgA, IgD, and IgE, inclusive of subclasses (e.g. IgG1, IgG2, IgG3, and IgG4, and IgA1 and IgA2)). In some embodiments, the linker is a hinge region of an antibody (e.g., of IgG, IgA, IgD, and IgE, inclusive of subclasses (e.g. IgG1, IgG2, IgG3, and IgG4, and IgA1 and IgA2)). Without wishing to be bound by theory, in some embodiments, the hinge region, found in IgG, IgA, IgD, and IgE class antibodies, acts as a flexible spacer, allowing the Fab portion to move freely in space. In contrast to the constant regions, the hinge domains are structurally diverse, varying in both sequence and length among immunoglobulin classes and subclasses. For example, the length and flexibility of the hinge region varies among the IgG subclasses. The hinge region of IgG1 encompasses amino acids 216-231 and, because it is freely flexible, the Fab fragments can rotate about their axes of symmetry and move within a sphere centered at the first of two inter-heavy chain disulfide bridges.

[0574] IgG2 has a shorter hinge than IgG1, with 12 amino acid residues and four disulfide bridges. The hinge region of IgG2 lacks a glycine residue, is relatively short, and contains a rigid poly-proline double helix, stabilized by extra inter-heavy chain disulfide bridges. These properties restrict the flexibility of the IgG2 molecule. IgG3 differs from the other subclasses by its unique extended hinge region (about four times as long as the IgG1 hinge), containing 62 amino acids (including 21 prolines and 11 cysteines), forming an inflexible poly-proline double helix. In IgG3, the Fab fragments are relatively far away from the Fc fragment, giving the molecule a greater flexibility. The elongated hinge in IgG3 is also responsible for its higher molecular weight compared to the other subclasses. The hinge region of IgG4 is shorter than that of IgG1 and its flexibility is intermediate between that of IgG1 and IgG2. The flexibility of the hinge regions reportedly decreases in the order IgG3>IgG1>IgG4>IgG2.

[0575] According to crystallographic studies, the immunoglobulin hinge region can be further subdivided functionally into three regions: the upper hinge region, the core region, and the lower hinge region. See Shin et al., 1992 Immunological Reviews 130:87. The upper hinge region includes amino acids from the carboxyl end of CH1 to the first residue in the hinge that restricts motion, generally the first cysteine residue that forms an interchain disulfide bond between the two heavy chains. The length of the upper hinge region correlates with the segmental flexibility of the antibody. The core hinge region contains the inter-heavy chain disulfide bridges, and the lower hinge region joins the amino terminal end of the CH2 domain and includes residues in CH2. The core hinge region of wild-type human IgG1 contains the sequence Cys-Pro-Pro-Cys, which, when dimerized by disulfide bond formation, results in a cyclic octapeptide believed to act as a pivot, thus conferring flexibility. In some embodiments, the present linker comprises, one, or two, or three of the upper hinge region, the core region, and the lower hinge region of any antibody (e.g., of IgG, IgA, IgD, and IgE, inclusive of subclasses (e.g. IgG1, IgG2, IgG3, and IgG4, and IgA1 and IgA2)). The hinge region may also contain one or more glycosylation sites, which include a number of structurally distinct types of sites for carbohydrate attachment. For example, IgA1 contains five glycosylation sites within a 17-amino-acid segment of the hinge region, conferring resistance of the hinge region polypeptide to intestinal proteases, considered an advantageous property for a secretory immunoglobulin. In some embodiments, the linker of the present technology comprises one or more glycosylation sites. In some embodiments, the linker is a hinge-CH2-CH3 domain of a human IgG4 antibody.

[0576] In some embodiments, the present FAP binding agent is linked to an antibody Fc domain, comprising one or both of CH2 and CH3 domains, and optionally a hinge region. For example, vectors encoding the present FAP binding agents linked as a single nucleotide sequence to an Fc domain can be used to prepare such polypeptides.

[0577] In some embodiments, the linker is a synthetic linker such as PEG.

[0578] In some embodiments, the linker may be functional. For example, in some embodiments, the linker functions to improve the folding and/or stability, improve the expression, improve the pharmacokinetics, and/or improve the bioactivity of the present FAP binding agent. In another example, the linker may function to target the FAP binding agent to a particular cell type or location.

[0579] Modifications and Production of FAP Binding Agents

[0580] In some embodiments, the FAP binding agent comprises a targeting moiety that is a VHH. In some embodiments, the VHH is not limited to a specific biological source or to a specific method of preparation. For example, the VHH can generally be obtained: (1) by isolating the VHH domain of a naturally occurring heavy chain antibody; (2) by expression of a nucleotide sequence encoding a naturally occurring VHH domain; (3) by “humanization” of a naturally occurring VHH domain or by expression of a nucleic acid encoding a such humanized VHH domain; (4) by “camelization” of a naturally occurring VH domain from any animal species, such as from a mammalian species, such as from a human being, or by expression of a nucleic acid encoding such a camelized VH domain; (5) by “camelization” of a “domain antibody” or “Dab” as described in the art, or by expression of a nucleic acid encoding such a camelized VH domain; (6) by using synthetic or semi-synthetic techniques for preparing proteins, polypeptides or other amino acid sequences known in the art; (7) by preparing a nucleic acid encoding a VHH using techniques for nucleic acid synthesis known in the art, followed by expression of the nucleic acid thus obtained; and/or (8) by any combination of one or more of the foregoing.

[0581] In an embodiment, the FAP binding agent comprises a VHH that corresponds to the VHH domains of naturally occurring heavy chain antibodies directed against human FAP. In some embodiments, such VHH sequences can generally be generated or obtained by suitably immunizing a species of Camelid with a FAP molecule, (i.e., so as to raise an immune response and/or heavy chain antibodies directed against FAP), by obtaining a suitable biological sample from the Camelid (such as a blood sample, or any sample of B-cells), and by generating VHH sequences directed against FAP, starting from the sample, using any suitable known techniques. In some embodiments, naturally occurring VHH domains against FAP can be obtained from naive libraries of Camelid VHH sequences, for example, by screening such a library using FAP or at least one part, fragment, antigenic determinant or epitope thereof using one or more screening techniques known in the art. Such libraries and techniques are, for example, described in WO 9937681, WO 0190190, WO 03025020 and WO 03035694, the entire contents of which are hereby incorporated by reference. In some embodiments, improved synthetic or semi-synthetic libraries derived from naive VHH libraries may be used, such as VHH libraries obtained from naive VHH libraries by techniques such as random mutagenesis and/or CDR shuffling, as for example, described in WO 0043507, the entire contents of which are hereby incorporated by reference. In some embodiments, another technique for obtaining VHH sequences directed against a FAP involves suitably immunizing a transgenic mammal that is capable of expressing heavy chain antibodies (i.e., so as to raise an immune response and/or heavy chain antibodies directed against FAP), obtaining a suitable biological sample from the transgenic mammal (such as a blood sample, or any sample of B-cells), and then generating VHH sequences directed against FAP starting from the sample, using any suitable known techniques. For example, for this purpose, the heavy chain antibody-expressing mice and the further methods and techniques described in WO 02085945 and in WO 04049794 (the entire contents of which are hereby incorporated by reference) can be used.

[0582] In an embodiment, the FAP binding agent comprises a VHH that has been “humanized” i.e., by replacing one or more amino acid residues in the amino acid sequence of the naturally occurring VHH sequence (and in particular in the framework sequences) by one or more of the amino acid residues that occur at the corresponding position(s) in a VH domain from a conventional 4-chain antibody from a human being. This can be performed using humanization techniques known in the art. In some embodiments, possible humanizing substitutions or combinations of humanizing substitutions may be determined by methods known in the art, for example, by a comparison between the sequence of a VHH and the sequence of a naturally occurring human VH domain. In some embodiments, the humanizing substitutions are chosen such that the resulting humanized VHHs still retain advantageous functional properties. Generally, as a result of humanization, the VHHs of the present technology may become more “human-like,” while still retaining favorable properties such as a reduced immunogenicity, compared to the corresponding naturally occurring VHH domains. In some embodiments, the humanized VHHs of the present technology can be obtained in any suitable manner known in the art and thus are not strictly limited to polypeptides that have been obtained using a polypeptide that comprises a naturally occurring VHH domain as a starting material.

[0583] In some embodiments, the FAP binding agent comprises a VHH that has been “camelized,” i.e., by replacing one or more amino acid residues in the amino acid sequence of a naturally occurring VH domain from a conventional 4-chain antibody by one or more of the amino acid residues that occur at the corresponding position(s) in a VHH domain of a heavy chain antibody of a camelid. In some embodiments, such “camelizing” substitutions are inserted at amino acid positions that form and/or are present at the VH-VL interface, and/or at the so-called Camelidae hallmark residues (see, for example, WO 9404678, the entire contents of which are hereby incorporated by reference). In some embodiments, the VH sequence that is used as a starting material or starting point for generating or designing the camelized VHH is a VH sequence from a mammal, for example, the VH sequence of a human being, such as a VH3 sequence. In some embodiments, the camelized VHHs can be obtained in any suitable manner known in the art (i.e., as indicated under points (1)-(8) above) and thus are not strictly limited to polypeptides that have been obtained using a polypeptide that comprises a naturally occurring VH domain as a starting material.

[0584] In some embodiments, both “humanization” and “camelization” can be performed by providing a nucleotide sequence that encodes a naturally occurring VHH domain or VH domain, respectively, and then changing, in a manner known in the art, one or more codons in the nucleotide sequence in such a way that the new nucleotide sequence encodes a “humanized” or “camelized” VHH, respectively. This nucleic acid can then be expressed in a manner known in the art, so as to provide the desired VHH of the present technology. Alternatively, based on the amino acid sequence of a naturally occurring VHH domain or VH domain, respectively, the amino acid sequence of the desired humanized or camelized VHH of the present technology, respectively, can be designed and then synthesized de novo using techniques for peptide synthesis known in the art. Also, based on the amino acid sequence or nucleotide sequence of a naturally occurring VHH domain or VH domain, respectively, a nucleotide sequence encoding the desired humanized or camelized VHH, respectively, can be designed and then synthesized de novo using techniques for nucleic acid synthesis known in the art, after which the nucleic acid thus obtained can be expressed in a manner known in the art, so as to provide the desired VHH of the present technology. Other suitable methods and techniques for obtaining the VHHs of the present technology and/or nucleic acids encoding the same, starting from naturally occurring VH sequences or VHH sequences, are known in the art, and may, for example, comprise combining one or more parts of one or more naturally occurring VH sequences (such as one or more FR sequences and/or CDR sequences), one or more parts of one or more naturally occurring VHH sequences (such as one or more FR sequences or CDR sequences), and/or one or more synthetic or semi-synthetic sequences, in a suitable manner, so as to provide a VHH of the present technology or a nucleotide sequence or nucleic acid encoding the same.

[0585] Methods for producing the FAP binding agents of the present technology are described herein. For example, DNA sequences encoding the FAP binding agents of the present technology can be chemically synthesized using methods known in the art. Synthetic DNA sequences can be ligated to other appropriate nucleotide sequences, including, e.g., expression control sequences, to produce gene expression constructs encoding the desired FAP binding agents. Accordingly, in some embodiments, the present technology provides for isolated nucleic acids comprising a nucleotide sequence encoding the FAP binding agent of the present technology.

[0586] Nucleic acids encoding the FAP binding agent of the present technology can be incorporated (ligated) into expression vectors, which can be introduced into host cells through transfection, transformation, or transduction techniques. For example, nucleic acids encoding the FAP binding agent of the present technology can be introduced into host cells by retroviral transduction. Illustrative host cells are E. coli cells, Chinese hamster ovary (CHO) cells, human embryonic kidney 293 (HEK 293) cells, HeLa cells, baby hamster kidney (BH K) cells, monkey kidney cells (COS), human hepatocellular carcinoma cells (e.g., Hep G2), and myeloma cells. Transformed host cells can be grown under conditions that permit the host cells to express the genes that encode the FAP binding agent of the present technology. Accordingly, in some embodiments, the present technology provides expression vectors comprising nucleic acids that encode the FAP binding agent of the present technology. In some embodiments, the present technology additional provides host cells comprising such expression vectors.

[0587] Specific expression and purification conditions will vary depending upon the expression system employed. For example, if a gene is to be expressed in E. coli, it is first cloned into an expression vector by positioning the engineered gene downstream from a suitable bacterial promoter, e.g., Trp or Tac, and a prokaryotic signal sequence. In another example, if the engineered gene is to be expressed in eukaryotic host cells, e.g., CHO cells, it is first inserted into an expression vector containing for example, a suitable eukaryotic promoter, a secretion signal, enhancers, and various introns. The gene construct can be introduced into the host cells using transfection, transformation, or transduction techniques.

[0588] The FAP binding agent of the present technology can be produced by growing a host cell transfected with an expression vector encoding the FAP binding agent under conditions that permit expression of the protein. Following expression, the protein can be harvested and purified using techniques well known in the art, e.g., affinity tags such as Glutathione-S-transferase (GST) and histidine (His) tags or by chromatography. In an embodiment, the FAP binding agent comprises a His tag. In some embodiments, the FAP binding agent comprises a His tag and a proteolytic site to allow cleavage of the His tag.

[0589] Accordingly, in some embodiments, the present technology provides for a nucleic acid encoding a FAP binding agent of the present technology. In some embodiments, the present technology provides for a host cell comprising a nucleic acid encoding a FAP binding agent of the present technology.

[0590] In some embodiments, the present FAP binding agent or chimeric protein or Fc-based chimeric protein complex comprising the same may be expressed in vivo, for instance, in a patient. For example, in some embodiments, the present FAP binding agent or chimeric protein or Fc-based chimeric protein complex comprising the same may administered in the form of nucleic acid which encodes the present FAP binding agents or chimeric proteins or Fc-based chimeric protein complex comprising the same. In some embodiments, the nucleic acid is DNA or RNA. In some embodiments, present FAP binding agent or chimeric protein or Fc-based chimeric protein complex comprising the same is encoded by a modified mRNA, i.e. an mRNA comprising one or more modified nucleotides. In some embodiments, the modified mRNA comprises one or modifications found in U.S. Pat. No. 8,278,036, the entire contents of which are hereby incorporated by reference. In some embodiments, the modified mRNA comprises one or more of m5C, m5U, m6A, s2U, ψ, and 2′-O-Methyl-U. In some embodiments, the present technology relates to administering a modified mRNA encoding one or more of the present chimeric proteins or Fc-based chimeric protein complex. In some embodiments, the present technology relates to gene therapy vectors comprising the same. In some embodiments, the present technology relates to gene therapy methods comprising the same. In some embodiments, the nucleic acid is in the form of an oncolytic virus, e.g. an adenovirus, reovirus, measles, herpes simplex, Newcastle disease virus or vaccinia.

[0591] Pharmaceutically Acceptable Salts and Excipients

[0592] The FAP binding agents (and/or any other therapeutic agents) described herein can possess a sufficiently basic functional group, which can react with an inorganic or organic acid, or a carboxyl group, which can react with an inorganic or organic base, to form a pharmaceutically acceptable salt. A pharmaceutically acceptable acid addition salt is formed from a pharmaceutically acceptable acid, as is well known in the art. Such salts include the pharmaceutically acceptable salts listed in, for example, Journal of Pharmaceutical Science, 66, 2-19 (1977) and The Handbook of Pharmaceutical Salts; Properties, Selection, and Use. P. H. Stahl and C. G. Wermuth (eds.), Verlag, Zurich (Switzerland) 2002, which are hereby incorporated by reference in their entirety.

[0593] Pharmaceutically acceptable salts include, by way of non-limiting example, sulfate, citrate, acetate, oxalate, chloride, bromide, iodide, nitrate, bisulfate, phosphate, acid phosphate, isonicotinate, lactate, salicylate, acid citrate, tartrate, oleate, tannate, pantothenate, bitartrate, ascorbate, succinate, maleate, gentisinate, fumarate, gluconate, glucaronate, saccharate, formate, benzoate, glutamate, methanesulfonate, ethanesulfonate, benzenesulfonate, p-toluenesulfonate, camphorsulfonate, pamoate, phenylacetate, trifluoroacetate, acrylate, chlorobenzoate, dinitrobenzoate, hydroxybenzoate, methoxybenzoate, methylbenzoate, o-acetoxybenzoate, naphthalene-2-benzoate, isobutyrate, phenylbutyrate, a-hydroxybutyrate, butyne-1,4-dicarboxylate, hexyne-1,4-dicarboxylate, caprate, caprylate, cinnamate, glycollate, heptanoate, hippurate, malate, hydroxymaleate, malonate, mandelate, mesylate, nicotinate, phthalate, teraphthalate, propiolate, propionate, phenylpropionate, sebacate, suberate, p-bromobenzenesulfonate, chlorobenzenesulfonate, ethylsulfonate, 2-hydroxyethylsulfonate, methylsulfonate, naphthalene-1-sulfonate, naphthalene-2-sulfonate, naphthalene-1,5-sulfonate, xylenesulfonate, and tartarate salts.

[0594] The term “pharmaceutically acceptable salt” also refers to a salt of the compositions of the present technology having an acidic functional group, such as a carboxylic acid functional group, and a base. Suitable bases include, but are not limited to, hydroxides of alkali metals such as sodium, potassium, and lithium; hydroxides of alkaline earth metal such as calcium and magnesium; hydroxides of other metals, such as aluminum and zinc; ammonia, and organic amines, such as unsubstituted or hydroxy-substituted mono-, di-, or tri-alkylamines, dicyclohexylamine; tributyl amine; pyridine; N-methyl, N-ethylamine; diethylamine; triethylamine; mono-, bis-, or tris-(2-OH-lower alkylamines), such as mono-; bis-, or tris-(2-hydroxyethyl)amine, 2-hydroxy-tert-butylamine, or tris-(hydroxymethyl)methylamine, N,N-di-lower alkyl-N-(hydroxyl-lower alkyl)-amines, such as N,N-dimethyl-N-(2-hydroxyethyl)amine or tri-(2-hydroxyethyl)amine; N-methyl-D-glucamine; and amino acids such as arginine, lysine, and the like.

[0595] In some embodiments, the compositions described herein are in the form of a pharmaceutically acceptable salt.

[0596] Pharmaceutical Compositions and Formulations

[0597] In some embodiments, the present technology pertains to pharmaceutical compositions comprising the FAP binding agents (and/or any other therapeutic agents) described herein and a pharmaceutically acceptable carrier or excipient. In some embodiments, the present technology pertains to pharmaceutical compositions comprising the present FAP binding agents. In another embodiment, the present technology pertains to pharmaceutical compositions comprising any other therapeutic agents described herein. I n a further embodiment, the present technology pertains to pharmaceutical compositions comprising a combination of the present FAP binding agents and any other therapeutic agents described herein. Any pharmaceutical compositions described herein can be administered to a subject as a component of a composition that comprises a pharmaceutically acceptable carrier or vehicle. Such compositions can optionally comprise a suitable amount of a pharmaceutically acceptable excipient so as to provide the form for proper administration.

[0598] In some embodiments, pharmaceutical excipients can be liquids, such as water and oils, including those of petroleum, animal, vegetable, or synthetic origin, such as peanut oil, soybean oil, mineral oil, sesame oil and the like. The pharmaceutical excipients can be, for example, saline, gum acacia, gelatin, starch paste, talc, keratin, colloidal silica, urea and the like. In addition, auxiliary, stabilizing, thickening, lubricating, and coloring agents can be used. In one embodiment, the pharmaceutically acceptable excipients are sterile when administered to a subject. Water is a useful excipient when any agent described herein is administered intravenously. Saline solutions and aqueous dextrose and glycerol solutions can also be employed as liquid excipients, specifically for injectable solutions. Suitable pharmaceutical excipients also include starch, glucose, lactose, sucrose, gelatin, malt, rice, flour, chalk, silica gel, sodium stearate, glycerol monostearate, talc, sodium chloride, dried skim milk, glycerol, propylene, glycol, water, ethanol and the like. Any agent described herein, if desired, can also comprise minor amounts of wetting or emulsifying agents, or pH buffering agents. Other examples of suitable pharmaceutical excipients are described in Remington's Pharmaceutical Sciences 1447-1676 (Alfonso R. Gennaro eds., 19th ed. 1995), incorporated herein by reference.

[0599] The present technology includes the described pharmaceutical compositions (and/or additional therapeutic agents) in various formulations. Any inventive pharmaceutical composition (and/or additional therapeutic agents) described herein can take the form of solutions, suspensions, emulsion, drops, tablets, pills, pellets, capsules, capsules containing liquids, gelatin capsules, powders, sustained-release formulations, suppositories, emulsions, aerosols, sprays, suspensions, lyophilized powder, frozen suspension, desiccated powder, or any other form suitable for use. In one embodiment, the composition is in the form of a capsule. In another embodiment, the composition is in the form of a tablet. In yet another embodiment, the pharmaceutical composition is formulated in the form of a soft-gel capsule. In a further embodiment, the pharmaceutical composition is formulated in the form of a gelatin capsule. In yet another embodiment, the pharmaceutical composition is formulated as a liquid.

[0600] In some embodiments, the inventive pharmaceutical compositions (and/or additional agents) can also include a solubilizing agent. Also, the agents can be delivered with a suitable vehicle or delivery device as known in the art. Combination therapies outlined herein can be co-delivered in a single delivery vehicle or delivery device.

[0601] The formulations comprising the inventive pharmaceutical compositions (and/or additional agents) of the present technology may conveniently be presented in unit dosage forms and may be prepared by any of the methods well known in the art of pharmacy. Such methods generally include the step of bringing the therapeutic agents into association with a carrier, which constitutes one or more accessory ingredients. Typically, the formulations are prepared by uniformly and intimately bringing the therapeutic agent into association with a liquid carrier, a finely divided solid carrier, or both, and then, if necessary, shaping the product into dosage forms of the desired formulation (e.g., wet or dry granulation, powder blends, etc., followed by tableting using conventional methods known in the art).

[0602] In some embodiments, any pharmaceutical compositions (and/or additional agents) described herein is formulated in accordance with routine procedures as a composition adapted for a mode of administration described herein.

[0603] In some embodiments, the routes of administration include, for example: oral, intradermal, intramuscular, intraperitoneal, intravenous, subcutaneous, intranasal, epidural, sublingual, intranasal, intracerebral, intravaginal, transdermal, rectally, by inhalation, or topically. Administration can be local or systemic. In some embodiments, the administering is effected orally. In another embodiment, the administration is by parenteral injection. The mode of administration can be left to the discretion of the practitioner, and depends in-part upon the site of the medical condition. In most instances, administration results in the release of any agent described herein into the bloodstream.

[0604] In some embodiments, the FAP binding agent described herein is formulated in accordance with routine procedures as a composition adapted for oral administration. By way of example, but not by way of limitation, in some embodiments, compositions for oral delivery are in the form of tablets, lozenges, aqueous or oily suspensions, granules, powders, emulsions, capsules, syrups, or elixirs. In some embodiments, orally administered compositions include one or more agents, for example, sweetening agents such as fructose, aspartame or saccharin; flavoring agents such as peppermint, oil of wintergreen, or cherry; coloring agents; and preserving agents, to provide a pharmaceutically palatable preparation. In some embodiments, the compositions, when in tablet or pill form, are coated to delay disintegration and absorption in the gastrointestinal tract thereby providing a sustained action over an extended period of time. Selectively permeable membranes surrounding an osmotically active driving any FAP binding agents described herein are also suitable for orally administered compositions. In these latter platforms, fluid from the environment surrounding the capsule is imbibed by the driving compound, which swells to displace the agent or agent composition through an aperture. These delivery platforms can provide an essentially zero order delivery profile as opposed to the spiked profiles of immediate release formulations. In some embodiments, the oral compositions include a time-delay material, such as, e.g., glycerol monostearate or glycerol stearate. In some embodiments, oral compositions include standard excipients such as mannitol, lactose, starch, magnesium stearate, sodium saccharin, cellulose, and magnesium carbonate. In one embodiment, the excipients are of pharmaceutical grade. Suspensions, in addition to the active compounds, may contain suspending agents such as, for example, ethoxylated isostearyl alcohols, polyoxyethylene sorbitol and sorbitan esters, microcrystalline cellulose, aluminum metahydroxide, bentonite, agar-agar, tragacanth, etc., and mixtures thereof.

[0605] Dosage forms suitable for parenteral administration (e.g. intravenous, intramuscular, intraperitoneal, subcutaneous and intra-articular injection and infusion) include, for example, solutions, suspensions, dispersions, emulsions, and the like. They may also be manufactured in the form of sterile solid compositions (e.g. lyophilized composition), which can be dissolved or suspended in sterile injectable medium immediately before use. They may contain, for example, suspending or dispersing agents known in the art. Formulation components suitable for parenteral administration include a sterile diluent such as water for injection, saline solution, fixed oils, polyethylene glycols, glycerine, propylene glycol or other synthetic solvents; antibacterial agents such as benzyl alcohol or methyl paraben; antioxidants such as ascorbic acid or sodium bisulfite; chelating agents such as EDTA; buffers such as acetates, citrates or phosphates; and agents for the adjustment of tonicity such as sodium chloride or dextrose.

[0606] For intravenous administration, suitable carriers include physiological saline, bacteriostatic water, Cremophor ELTM (BASF, Parsippany, N.J.) or phosphate buffered saline (PBS). The carrier should be stable under the conditions of manufacture and storage, and should be preserved against microorganisms. The carrier can be a solvent or dispersion medium containing, for example, water, ethanol, polyol (for example, glycerol, propylene glycol, and liquid polyetheylene glycol), and suitable mixtures thereof.

[0607] The compositions provided herein, alone or in combination with other suitable components, can be made into aerosol formulations (i.e., “nebulized”) to be administered via inhalation. Aerosol formulations can be placed into pressurized acceptable propellants, such as dichlorodifluoromethane, propane, nitrogen, and the like.

[0608] Any inventive pharmaceutical compositions (and/or additional agents) described herein can be administered by controlled-release or sustained-release means or by delivery devices that are well known to those of ordinary skill in the art. Examples include, but are not limited to, those described in U.S. Pat. Nos. 3,845,770; 3,916,899; 3,536,809; 3,598,123; 4,008,719; 5,674,533; 5,059,595; 5,591,767; 5,120,548; 5,073,543; 5,639,476; 5,354,556; and 5,733,556, each of which is incorporated herein by reference in its entirety. Such dosage forms can be useful for providing controlled- or sustained-release of one or more active ingredients using, for example, hydropropyl cellulose, hydropropylmethyl cellulose, polyvinylpyrrolidone, other polymer matrices, gels, permeable membranes, osmotic systems, multilayer coatings, microparticles, liposomes, microspheres, or a combination thereof to provide the desired release profile in varying proportions. Suitable controlled- or sustained-release formulations known to those skilled in the art, including those described herein, can be readily selected for use with the active ingredients of the agents described herein. The present technology, thus, provides single unit dosage forms suitable for oral administration such as, but not limited to, tablets, capsules, gelcaps, and caplets that are adapted for controlled- or sustained-release.

[0609] Controlled- or sustained-release of an active ingredient can be stimulated by various conditions, including but not limited to, changes in pH, changes in temperature, stimulation by an appropriate wavelength of light, concentration or availability of enzymes, concentration or availability of water, or other physiological conditions or compounds.

[0610] In another embodiment, a controlled-release system can be placed in proximity of the target area to be treated, thus requiring only a fraction of the systemic dose (see, e.g., Goodson, in Medical Applications of Controlled Release, supra, vol. 2, pp. 115-138 (1984)). Other controlled-release systems discussed in the review by Langer, 1990, Science 249:1527-1533) may be used.

[0611] Pharmaceutical formulations preferably are sterile. Sterilization can be accomplished, for example, by filtration through sterile filtration membranes. Where the composition is lyophilized, filter sterilization can be conducted prior to or following lyophilization and reconstitution.

[0612] Administration and Dosage

[0613] It will be appreciated that the actual dose of the FAP binding agent and/or any therapeutic agents described herein to be administered according to the present technology will vary according to the particular dosage form, and the mode of administration. Many factors that may modify the action of the FAP binding agent (e.g., body weight, gender, diet, time of administration, route of administration, rate of excretion, condition of the subject, drug combinations, genetic disposition and reaction sensitivities) can be taken into account by those skilled in the art. Administration can be carried out continuously or in one or more discrete doses within the maximum tolerated dose. Optimal administration rates for a given set of conditions can be ascertained by those skilled in the art using conventional dosage administration tests.

[0614] In some embodiments, a suitable dosage of the FAP binding agent and/or any therapeutic agents described herein is in a range of about 0.01 mg/kg to about 10 g/kg of body weight of the subject, about 0.01 mg/kg to about 1 g/kg of body weight of the subject, about 0.01 mg/kg to about 100 mg/kg of body weight of the subject, about 0.01 mg/kg to about 10 mg/kg of body weight of the subject, for example, about 0.01 mg/kg, about 0.02 mg/kg, about 0.03 mg/kg, about 0.04 mg/kg, about 0.05 mg/kg, about 0.06 mg/kg, about 0.07 mg/kg, about 0.08 mg/kg, about 0.09 mg/kg, about 0.1 mg/kg, about 0.2 mg/kg, about 0.3 mg/kg, about 0.4 mg/kg, about 0.5 mg/kg, about 0.6 mg/kg, about 0.7 mg/kg, about 0.8 mg/kg, about 0.9 mg/kg, about 1 mg/kg, about 1.1 mg/kg, about 1.2 mg/kg, about 1.3 mg/kg, about 1.4 mg/kg, about 1.5 mg/kg, about 1.6 mg/kg, about 1.7 mg/kg, about 1.8 mg/kg, 1.9 mg/kg, about 2 mg/kg, about 3 mg/kg, about 4 mg/kg, about 5 mg/kg, about 6 mg/kg, about 7 mg/kg, about 8 mg/kg, about 9 mg/kg, about 10 mg/kg body weight, about 100 mg/kg body weight, about 1 g/kg of body weight, about 10 g/kg of body weight, inclusive of all values and ranges therebetween.

[0615] In some embodiments, individual doses of the FAP binding agent and/or any therapeutic agents described herein are administered in unit dosage forms containing, for example, from about 0.01 mg to about 100 g, from about 0.01 mg to about 75 g, from about 0.01 mg to about 50 g, from about 0.01 mg to about 25 g, about 0.01 mg to about 10 g, about 0.01 mg to about 7.5 g, about 0.01 mg to about 5 g, about 0.01 mg to about 2.5 g, about 0.01 mg to about 1 g, about 0.01 mg to about 100 mg, from about 0.1 mg to about 100 mg, from about 0.1 mg to about 90 mg, from about 0.1 mg to about 80 mg, from about 0.1 mg to about 70 mg, from about 0.1 mg to about 60 mg, from about 0.1 mg to about 50 mg, from about 0.1 mg to about 40 mg active ingredient, from about 0.1 mg to about 30 mg, from about 0.1 mg to about 20 mg, from about 0.1 mg to about 10 mg, from about 0.1 mg to about 5 mg, from about 0.1 mg to about 3 mg, from about 0.1 mg to about 1 mg per unit dosage form, or from about 5 mg to about 80 mg per unit dosage form. For example, a unit dosage form can be about 0.01 mg, about 0.02 mg, about 0.03 mg, about 0.04 mg, about 0.05 mg, about 0.06 mg, about 0.07 mg, about 0.08 mg, about 0.09 mg, about 0.1 mg, about 0.2 mg, about 0.3 mg, about 0.4 mg, about 0.5 mg, about 0.6 mg, about 0.7 mg, about 0.8 mg, about 0.9 mg, about 1 mg, about 2 mg, about 3 mg, about 4 mg, about 5 mg, about 6 mg, about 7 mg, about 8 mg, about 9 mg about 10 mg, about 15 mg, about 20 mg, about 25 mg, about 30 mg, about 35 mg, about 40 mg, about 45 mg, about 50 mg, about 55 mg, about 60 mg, about 65 mg, about 70 mg, about 75 mg, about 80 mg, about 85 mg, about 90 mg, about 95 mg, about 100 mg, about 200 mg, about 500 mg, about 1 g, about 2.5 g, about 5 g, about 10 g, about 25 g, about 50 g, about 75 g, about 100 g, inclusive of all values and ranges therebetween.

[0616] In one embodiment, the FAP binding agent and/or any therapeutic agents described herein are administered at an amount of from about 0.01 mg to about 100 g daily, from about 0.01 mg to about 75 g daily, from about 0.01 mg to about 50 g daily, from about 0.01 mg to about 25 g daily, from about 0.01 mg to about 10 g daily, from about 0.01 mg to about 7.5 g daily, from about 0.01 mg to about 5 g daily, from about 0.01 mg to about 2.5 g daily, from about 0.01 mg to about 1 g daily, from about 0.01 mg to about 100 mg daily, from about 0.1 mg to about 100 mg daily, from about 0.1 mg to about 95 mg daily, from about 0.1 mg to about 90 mg daily, from about 0.1 mg to about 85 mg daily, from about 0.1 mg to about 80 mg daily, from about 0.1 mg to about 75 mg daily, from about 0.1 mg to about 70 mg daily, from about 0.1 mg to about 65 mg daily, from about 0.1 mg to about 60 mg daily, from about 0.1 mg to about 55 mg daily, from about 0.1 mg to about 50 mg daily, from about 0.1 mg to about 45 mg daily, from about 0.1 mg to about 40 mg daily, from about 0.1 mg to about 35 mg daily, from about 0.1 mg to about 30 mg daily, from about 0.1 mg to about 25 mg daily, from about 0.1 mg to about 20 mg daily, from about 0.1 mg to about 15 mg daily, from about 0.1 mg to about 10 mg daily, from about 0.1 mg to about 5 mg daily, from about 0.1 mg to about 3 mg daily, from about 0.1 mg to about 1 mg daily, or from about 5 mg to about 80 mg daily. In some embodiments, the FAP binding agent is administered at a daily dose of about 0.01 mg, about 0.02 mg, about 0.03 mg, about 0.04 mg, about 0.05 mg, about 0.06 mg, about 0.07 mg, about 0.08 mg, about 0.09 mg, about 0.1 mg, about 0.2 mg, about 0.3 mg, about 0.4 mg, about 0.5 mg, about 0.6 mg, about 0.7 mg, about 0.8 mg, about 0.9 mg, about 1 mg, about 2 mg, about 3 mg, about 4 mg, about 5 mg, about 6 mg, about 7 mg, about 8 mg, about 9 mg about 10 mg, about 15 mg, about 20 mg, about 25 mg, about 30 mg, about 35 mg, about 40 mg, about 45 mg, about 50 mg, about 55 mg, about 60 mg, about 65 mg, about 70 mg, about 75 mg, about 80 mg, about 85 mg, about 90 mg, about 95 mg, about 100 mg, about 200 mg, about 500 mg, about 1 g, about 2.5 g, about 5 g, about 7.5 g, about 10 g, about 25 g, about 50 g, about 75 g, about 100 g, inclusive of all values and ranges therebetween.

[0617] In accordance with certain embodiments of the present technology, the pharmaceutical composition comprising the FAP binding agent and/or any therapeutic agents described herein may be administered, for example, more than once daily (e.g., about two times, about three times, about four times, about five times, about six times, about seven times, about eight times, about nine times, or about ten times daily), about once per day, about every other day, about every third day, about once a week, about once every two weeks, about once every month, about once every two months, about once every three months, about once every six months, or about once every year.

[0618] Combination Therapy and Additional Therapeutic Agents

[0619] In some embodiments, the pharmaceutical composition of the present technology is co-administered in conjunction with one or more additional therapeutic agents. In some embodiments, co-administration can be simultaneous or sequential.

[0620] In one embodiment, the additional therapeutic agent and the FAP binding agent of the present technology are administered to a subject simultaneously. The term “simultaneously” as used herein, means that the additional therapeutic agent and the FAP binding agent are administered with a time separation of no more than about 60 minutes, such as no more than about 30 minutes, no more than about 20 minutes, no more than about 10 minutes, no more than about 5 minutes, or no more than about 1 minute.

[0621] Administration of the additional therapeutic agent and the FAP binding agent can be by simultaneous administration of a single formulation (e.g., a formulation comprising the additional therapeutic agent and the FAP binding agent) or of separate formulations (e.g., a first formulation including the additional therapeutic agent and a second formulation including the FAP binding agent).

[0622] Co-administration does not require the therapeutic agents to be administered simultaneously, if the timing of their administration is such that the pharmacological activities of the additional therapeutic agent and the FAP binding agent overlap in time, thereby exerting a combined therapeutic effect. For example, the additional therapeutic agent and the FAP binding agent can be administered sequentially. The term “sequentially” as used herein means that the additional therapeutic agent and the FAP binding agent are administered with a time separation of more than about 60 minutes. For example, the time between the sequential administration of the additional therapeutic agent and the FAP binding agent can be more than about 60 minutes, more than about 2 hours, more than about 5 hours, more than about 10 hours, more than about 1 day, more than about 2 days, more than about 3 days, more than about 1 week, or more than about 2 weeks, or more than about one month apart. The optimal administration times will depend on the rates of metabolism, excretion, and/or the pharmacodynamic activity of the additional therapeutic agent and the FAP binding agent being administered. Either the additional therapeutic agent or the FAP binding agent cell may be administered first.

[0623] Co-administration also does not require the therapeutic agents to be administered to the subject by the same route of administration. Rather, each therapeutic agent can be administered by any appropriate route, for example, parenterally or non-parenterally.

[0624] In some embodiments, the FAP binding agent described herein acts synergistically when co-administered with another therapeutic agent. As used herein, a “synergistically” refers to a greater-than-additive therapeutic effect, which is produced by a combination of at least two agents, and which exceeds that which would otherwise result from the individual administration of the agents. For example, lower doses of one or more agents may be used in treating a disease or disorder, resulting in increased therapeutic efficacy and decreased side-effects. In such embodiments, the FAP binding agent and the additional therapeutic agent may be administered at doses that are lower than the doses employed when the agents are used in the context of monotherapy.

[0625] In some embodiments, the present technology pertains to chemotherapeutic agents as additional therapeutic agents. For example, without limitation, such combination of the present FAP binding agents and chemotherapeutic agent find use in the treatment of cancers, as described elsewhere herein. Examples of chemotherapeutic agents include, but are not limited to, alkylating agents such as thiotepa and CYTOXAN cyclosphosphamide; alkyl sulfonates such as busulfan, improsulfan and piposulfan; aziridines such as benzodopa, carboquone, meturedopa, and uredopa; ethylenimines and methylamelamines including altretamine, triethylenemelamine, trietylenephosphoramide, triethiylenethiophosphoramide and trimethylolomelamine; acetogenins (e.g., bullatacin and bullatacinone); a camptothecin (including the synthetic analogue topotecan); bryostatin; cally statin; CC-1065 (including its adozelesin, carzelesin and bizelesin synthetic analogues); cryptophycins (e.g., cryptophycin 1 and cryptophycin 8); dolastatin; duocarmycin (including the synthetic analogues, KW-2189 and CB 1-TM1); eleutherobin; pancratistatin; a sarcodictyin; spongistatin; nitrogen mustards such as chlorambucil, chlornaphazine, cholophosphamide, estramustine, ifosfamide, mechlorethamine, mechlorethamine oxide hydrochloride, melphalan, novembichin, phenesterine, prednimustine, trofosfamide, uracil mustard; nitrosureas such as carmustine, chlorozotocin, fotemustine, lomustine, nimustine, and ranimnustine; antibiotics such as the enediyne antibiotics (e.g., calicheamicin, especially calicheamicin gammall and calicheamicin omegall (see, e.g., Agnew, Chem. Intl. Ed. Engl., 33: 183-186 (1994)); dynemicin, including dynemicin A; bisphosphonates, such as clodronate; an esperamicin; as well as neocarzinostatin chromophore and related chromoprotein enediyne antibiotic chromophores), aclacinomysins, actinomycin, authramycin, azaserine, bleomycins, cactinomycin, carabicin, caminomycin, carzinophilin, chromomycinis, dactinomycin, daunorubicin, detorubicin, 6-diazo-5-oxo-L-norleucine, ADRIAMYCIN doxorubicin (including morpholino-doxorubicin, cyanomorpholino-doxorubicin, 2-pyrrolino-doxorubicin and deoxy doxorubicin), epirubicin, esorubicin, idarubicin, marcellomycin, mitomycins such as mitomycin C, mycophenolic acid, nogalamycin, olivomycins, peplomycin, potfiromycin, puromycin, quelamycin, rodorubicin, streptonigrin, streptozocin, tubercidin, ubenimex, zinostatin, zorubicin; anti-metabolites such as methotrexate and 5-fluorouracil (5-FU); folic acid analogues such as denopterin, methotrexate, pteropterin, trimetrexate; purine analogs such as fludarabine, 6-mercaptopurine, thiamiprine, thioguanine; pyrimidine analogs such as ancitabine, azacitidine, 6-azauridine, carmofur, cytarabine, dideoxyuridine, doxifluridine, enocitabine, floxuridine; androgens such as calusterone, dromostanolone propionate, epitiostanol, mepitiostane, testolactone; anti-adrenals such as minoglutethimide, mitotane, trilostane; folic acid replenisher such as frolinic acid; aceglatone; aldophosphamide glycoside; aminolevulinic acid; eniluracil; amsacrine; bestrabucil; bisantrene; edatraxate; demecolcine; diaziquone; elformithine; elliptinium acetate; an epothilone; etoglucid; gallium nitrate; hydroxyurea; lentinan; lonidainine; maytansinoids such as maytansine and ansamitocins; mitoguazone;

[0626] mitoxantrone; mopidanmol; nitraerine; pentostatin; phenamet; pirarubicin; losoxantrone; podophyllinic acid; 2-ethylhydrazide; procarbazine; PSK polysaccharide complex (JHS Natural Products, Eugene, Oreg.); razoxane; rhizoxin; sizofuran; spirogermanium; tenuazonic acid; triaziquone; 2,2′,2″-trichlorotriethylamine; trichothecenes (e.g., T-2 toxin, verracurin A, roridin A and anguidine); urethan; vindesine; dacarbazine; mannomustine; mitobronitol; mitolactol; pipobroman; gacytosine; arabinoside (“Ara-C”); cyclophosphamide; thiotepa; toxoids (e.g., TAXOL, paclitaxel (Bristol-Myers Squibb Oncology, Princeton, N.J.), ABRAXANE®, Cremophor-free, albumin-engineered nanoparticle formulation of paclitaxel (American Pharmaceutical Partners, Schaumberg, 111.), and TAXOTERE doxetaxel (Rhone-Poulenc Rorer, Antony, France)); chloranbucil; GEMZAR (gemcitabine); 6-thioguanine; mercaptopurine; methotrexate; platinum analogs (such as, e.g., cisplatin, oxaliplatin and carboplatin); vinblastine; platinum; etoposide (VP-16); ifosfamide; mitoxantrone; vincristine; NAVELBINE (vinorelbine); novantrone; teniposide; edatrexate; daunomycin; aminopterin; xeloda; ibandronate; irinotecan (Camptosar, CPT-11) (including the treatment regimen of irinotecan with 5-FU and leucovorin); topoisomerase inhibitor RFS 2000; difluoromethylornithine (DMFO); retinoids such as retinoic acid; capecitabine; combretastatin; leucovorin (LV); oxaliplatin, including the oxaliplatin treatment regimen (FOLFOX); lapatinib (Tykerb); inhibitors of PKC-a, Raf, H-Ras, EGFR (e.g., erlotinib (Tarceva®)) and VEGF-A that reduce cell proliferation and pharmaceutically acceptable salts, acids or derivatives of any of the above. In addition, in some embodiments, the methods of treatment further include the use of radiation. In addition, in some embodiments, the methods of treatment further include the use of photodynamic therapy.

[0627] Accordingly, in some embodiments, the present technology relates to combination therapies using the FAP binding agent and a chemotherapeutic agent. In some embodiments, the present technology relates to administration of the FAP binding agent to a patient undergoing treatment with a chemotherapeutic agent. In some embodiments, the chemotherapeutic agent is a DNA-intercalating agent, such as, without limitation, doxorubicin, cisplatin, daunorubicin, and epirubicin. In some embodiments, the DNA-intercalating agent is doxorubicin.

[0628] In some embodiments, the FAP binding agent acts synergistically when co-administered with doxorubicin. In some embodiments, the FAP binding agent acts synergistically when co-administered with doxorubicin for use in treating tumor or cancer. For example, co-administration of the FAP binding agent and doxorubicin may act synergistically to reduce or eliminate the tumor or cancer, or slow the growth and/or progression and/or metastasis of the tumor or cancer. In some embodiments, the combination of the FAP binding agent and doxorubicin may exhibit improved safety profiles when compared to the agents used alone in the context of monotherapy. In some embodiments, the FAP binding agent and doxorubicin are administered at doses that are lower than the doses employed when the agents are used in the context of monotherapy. In some embodiments, the FAP binding agent comprises a mutated interferon such as a mutated IFNα. In some embodiments, the mutated IFNa comprises one or more mutations at positions 148, 149, and 153 with reference to SEQ ID NO: 688 or SEQ ID NO: 689, such as the substitutions M148A, R149A, and L153A.

[0629] In some embodiments, the present technology relates to combination therapy with one or more immune-modulating agents, for example, without limitation, agents that modulate immune checkpoint. In some embodiments, the immune-modulating agent targets one or more of PD-1, PD-L1, and PD-L2. In some embodiments, the immune-modulating agent is PD-1 inhibitor. In some embodiments, the immune-modulating agent is an antibody specific for one or more of PD-1, PD-L1, and PD-L2. For instance, in some embodiments, the immune-modulating agent is an antibody such as, by way of non-limitation, nivolumab, (ONO-4538/BMS-936558, MDX1106, OPDIVO, BRISTOL MYERS SQUIBB), pembrolizumab (KEYTRUDA, MERCK), pidilizumab (CT-011, CURE TECH), MK-3475 (MERCK), BMS 936559 (BRISTOL MYERS SQUIBB), MPDL3280A (ROCHE). In some embodiments, the immune-modulating agent targets one or more of CD137 or CD137L. In some embodiments, the immune-modulating agent is an antibody specific for one or more of CD137 or CD137L. For instance, in some embodiments, the immune-modulating agent is an antibody such as, by way of non-limitation, urelumab (also known as BMS-663513 and anti-4-1BB antibody). In some embodiments, the present chimeric protein or Fc-based chimeric protein complex is combined with urelumab (optionally with one or more of nivolumab, lirilumab, and urelumab) for the treatment of solid tumors and/or B-cell non-Hodgkins lymphoma and/or head and neck cancer and/or multiple myeloma. In some embodiments, the immune-modulating agent is an agent that targets one or more of CTLA-4, AP2M1, CD80, CD86, SHP-2, and PPP2R5A. In some embodiments, the immune-modulating agent is an antibody specific for one or more of CTLA-4, AP2M1, CD80, CD86, SHP-2, and PPP2R5A. For instance, in some embodiments, the immune-modulating agent is an antibody such as, by way of non-limitation, ipilimumab (MDX-010, MDX-101, Yervoy, BMS) and/or tremelimumab (Pfizer). In some embodiments, the present chimeric protein or Fc-based chimeric protein complex is combined with ipilimumab (optionally with bavituximab) for the treatment of one or more of melanoma, prostate cancer, and lung cancer. In some embodiments, the immune-modulating agent targets CD20. In some embodiments, the immune-modulating agent is an antibody specific CD20. For instance, in some embodiments, the immune-modulating agent is an antibody such as, by way of non-limitation, Ofatumumab (GENMAB), obinutuzumab (GAZYVA), AME-133v (APPLIED MOLECULAR EVOLUTION), Ocrelizumab (GENENTECH), TRU-015 (TRUBION/EMERGENT), veltuzumab (IMMU-106).

[0630] In some embodiments, the present technology relates to combination therapy using the FAP binding agent and a checkpoint inhibitor. In some embodiments, the present technology relates to administration of the FAP binding agent to a patient undergoing treatment with a checkpoint inhibitor. In some embodiments, the checkpoint inhibitor is an agent that targets one or more of PD-1, PD-L1, PD-L2, and CTLA-4 (including any of the anti-PD-1, anti-PD-L1, anti-PD-L2, and anti-CTLA-4 agents described herein). In some embodiment, the checkpoint inhibitor is one or more of nivolumab, (ONO-4538/BMS-936558, MDX1106, OPDIVO, BRISTOL MYERS SQUIBB), pembrolizumab (KEYTRUDA, MERCK), pidilizumab (CT-011, CURE TECH), MK-3475 (MERCK), BMS 936559 (BRISTOL MYERS SQUIBB), MPDL3280A (ROCHE), ipilimumab (MDX-010, MDX-101, Yervoy, BMS) and tremelimumab (Pfizer). In some embodiments, the checkpoint inhibitor is an antibody against PD-L1.

[0631] In some embodiments, the FAP binding agent acts synergistically when co-administered with the anti-PD-L1 antibody. In some embodiments, the FAP binding agent acts synergistically when co-administered with the anti-PD-L1 antibody for use in treating tumor or cancer. For example, co-administration of the FAP binding agent and the anti-PD-L1 antibody may act synergistically to reduce or eliminate the tumor or cancer, or slow the growth and/or progression and/or metastasis of the tumor or cancer. In some embodiments, the combination of the FAP binding agent and the anti-PD-L1 antibody may exhibit improved safety profiles when compared to the agents used alone in the context of monotherapy. In some embodiments, the FAP binding agent and the anti-PD-L1 antibody may be administered at doses that are lower than the doses employed when the agents are used in the context of monotherapy. In some embodiments, the FAP binding agent comprises a mutated interferon such as a mutated IFNa. In illustrative embodiments, the mutated IFNa comprises one or more mutations at positions 148, 149, and 153 with reference to SEQ ID NO: 688 or SEQ ID NO: 689, such as the substitutions M148A, R149A, and L153A.

[0632] In some embodiments, the present technology relates to combination therapies using the FAP binding agent and an immunosuppressive agent. In some embodiments, the present technology relates to administration of the FAP binding agent to a patient undergoing treatment with an immunosuppressive agent. In some embodiments, the immunosuppressive agent is TNF.

[0633] In illustrative embodiments, the FAP binding agent acts synergistically when co-administered with TNF. In an illustrative embodiment, the FAP binding agent acts synergistically when co-administered with TNF for use in treating tumor or cancer. For example, co-administration of the FAP binding agent and TNF may act synergistically to reduce or eliminate the tumor or cancer, or slow the growth and/or progression and/or metastasis of the tumor or cancer. In some embodiments, the combination of the FAP binding agent and TNF may exhibit improved safety profiles when compared to the agents used alone in the context of monotherapy. In some embodiments, the FAP binding agent and TNF may be administered at doses that are lower than the doses employed when the agents are used in the context of monotherapy. In some embodiments, the FAP binding agent comprises a mutated interferon such as a mutated IFNα. In illustrative embodiments, the mutated IFNa comprises one or more mutations at positions 148, 149, and 153 with reference to SEQ ID NO: 688 or SEQ ID NO: 689, such as the substitutions M148A, R149A, and L153A.

[0634] In some embodiments, the FAP binding agent acts synergistically when used in combination with Chimeric Antigen Receptor (CAR) T-cell therapy. In an illustrative embodiment, the FAP binding agent acts synergistically when used in combination with CAR T-cell therapy in treating tumor or cancer. In an embodiment, the FAP binding agent acts synergistically when used in combination with CAR T-cell therapy in treating blood-based tumors. In an embodiment, the FAP binding agent acts synergistically when used in combination with CAR T-cell therapy in treating solid tumors. For example, use of the FAP binding agent and CAR T-cells may act synergistically to reduce or eliminate the tumor or cancer, or slow the growth and/or progression and/or metastasis of the tumor or cancer. In some embodiments, the FAP binding agent of the present technology induces CAR T-cell division. In some embodiments, the FAP binding agent of the present technology induces CAR T-cell proliferation. In some embodiments, the FAP binding agent of the present technology prevents anergy of the CAR T cells.

[0635] In some embodiments, the CAR T-cell therapy comprises CART cells that target antigens (e.g., tumor antigens) such as, but not limited to, carbonic anhydrase IX (CAIX), 5T4, CD19, CD20, CD22, CD30, CD33, CD38, CD47, CS1, CD138, Lewis-Y, L1-CAM, MUC16, ROR-1, IL13Ra2, gp100, prostate stem cell antigen (PSCA), prostate-specific membrane antigen (PSMA), B-cell maturation antigen (BCMA), human papillomavirus type 16 E6 (HPV-16 E6), CD171, folate receptor alpha (FR-a), GD2, human epidermal growth factor receptor 2 (HER2), mesothelin, EGFRvIII, fibroblast activation protein (FAP), carcinoembryonic antigen (CEA), and vascular endothelial growth factor receptor 2 (VEGF-R2), as well as other tumor antigens well known in the art. Additional illustrative tumor antigens include, but are not limited to MART-1/Melan-A, gp100, Dipeptidyl peptidase IV (DPPIV), adenosine deaminase-binding protein (ADAbp), cyclophilin b, Colorectal associated antigen (CRC)-0017-1A/GA733, Carcinoembryonic Antigen (CEA) and its immunogenic epitopes CAP-1 and CAP-2, etv6, am11, Prostate Specific Antigen (PSA) and its immunogenic epitopes PSA-1, PSA-2, and PSA-3, T-cell receptor/CD3-zeta chain, MAGE-family of tumor antigens (e.g., MAGE-A1, MAGE-A2, MAGE-A3, MAGE-A4, MAGE-A5, MAGE-A6, MAGE-A7, MAGE-A8, MAGE-A9, MAGE-A10, MAGE-A11, MAGE-A12, MAGE-Xp2 (MAGE-B2), MAGE-Xp3 (MAGE-B3), MAGE-Xp4 (MAGE-B4), MAGE-C1, MAGE-C2, MAGE-C3, MAGE-C4, MAGE-05), GAGE-family of tumor antigens (e.g., GAGE-1, GAGE-2, GAGE-3, GAGE-4, GAGE-5, GAGE-6, GAGE-7, GAGE-8, GAGE-9), BAGE, RAGE, LAGE-1, NAG, GnT-V, MUM-1, CDK4, tyrosinase, p53, MUC family, HER2/neu, p21ras, RCAS1, a-fetoprotein, E-cadherin, a-catenin, 3-catenin and y-catenin, p120ctn, gp100 Pme1117, PRAME, NY-ESO-1, cdc27, adenomatous polyposis coli protein (APC), fodrin, Connexin 37, Ig-idiotype, p15, gp75, GM2 and GD2 gangliosides, viral products such as human papilloma virus proteins, Smad family of tumor antigens, Imp-1, NA, EBV-encoded nuclear antigen (EBNA)-1, brain glycogen phosphorylase, SSX-1, SSX-2 (HOM-MEL-40), SSX-1, SSX-4, SSX-5, SCP-1 CT-7, c-erbB-2, CD19, CD37, CD56, CD70, CD74, CD138, AGS16, MUC1 , GPNMB, Ep-CAM, PD-L1, and PD-L2.

[0636] Illustrative CAR T-cell therapy include, but are not limited to, JCAR014 (Juno Therapeutics), JCAR015 (Juno Therapeutics), JCAR017 (Juno Therapeutics), JCAR018 (Juno Therapeutics), JCAR020 (Juno Therapeutics), JCAR023 (Juno Therapeutics), JCAR024 (Juno Therapeutics), CTL019 (Novartis), KTE-C19 (Kite Pharma), BPX-401 (Bellicum Pharmaceuticals), BPX-501 (Bellicum Pharmaceuticals), BPX-601 (Bellicum Pharmaceuticals), bb2121 (Bluebird Bio), CD-19 Sleeping Beauty cells (Ziopharm Oncology), UCART19 (Cellectis), UCART123 (Cellectis), UCART38 (Cellectis), UCARTCS1 (Cellectis), OXB-302 (Oxford BioMedica, MB-101 (Mustang Bio) and CAR T-cells developed by Innovative Cellular Therapeutics.

[0637] In some embodiments, the present technology relates to combination therapy with one or more chimeric agents described in WO 2013/10779, WO 2015/007536, WO 2015/007520, WO 2015/007542, and WO 2015/007903, the entire contents of which are hereby incorporated by reference in their entireties.

[0638] In some embodiments, inclusive of, without limitation, infectious disease applications, the present technology pertains to anti-infectives as additional therapeutic agents. In some embodiments, the anti-infective is an anti-viral agent including, but not limited to, Abacavir, Acyclovir, Adefovir, Amprenavir, Atazanavir, Cidofovir, Darunavir, Delavirdine, Didanosine, Docosanol, Efavirenz, Elvitegravir, Emtricitabine, Enfuvirtide, Etravirine, Famciclovir, and Foscarnet. In some embodiments, the anti-infective is an anti-bacterial agent including, but not limited to, cephalosporin antibiotics (cephalexin, cefuroxime, cefadroxil, cefazolin, cephalothin, cefaclor, cefamandole, cefoxitin, cefprozil, and ceftobiprole); fluoroquinolone antibiotics (cipro, Levaquin, floxin, tequin, avelox, and norflox); tetracycline antibiotics (tetracycline, minocycline, oxytetracycline, and doxycycline); penicillin antibiotics (amoxicillin, ampicillin, penicillin V, dicloxacillin, carbenicillin, vancomycin, and methicillin); monobactam antibiotics (aztreonam); and carbapenem antibiotics (ertapenem, doripenem, imipenem/cilastatin, and meropenem). In some embodiments, the anti-infectives include anti-malarial agents (e.g., chloroquine, quinine, mefloquine, primaquine, doxycycline, artemether/lumefantrine, atovaquone/proguanil and sulfadoxine/pyrimethamine), metronidazole, tinidazole, ivermectin, pyrantel pamoate, and albendazole.

[0639] In some embodiments, inclusive, without limitation, of autoimmune applications, the additional therapeutic agent is an immunosuppressive agent. In some embodiments, the immunosuppressive agent is an anti-inflammatory agent such as a steroidal anti-inflammatory agent or a non-steroidal anti-inflammatory agent (NSAID). Steroids, particularly the adrenal corticosteroids and their synthetic analogues, are well known in the art. Examples of corticosteroids useful in the present technology include, without limitation, hydroxyltriamcinolone, alpha-methyl dexamethasone, beta-methyl betamethasone, beclomethasone dipropionate, betamethasone benzoate, betamethasone dipropionate, betamethasone valerate, clobetasol valerate, desonide, desoxymethasone, dexamethasone, diflorasone diacetate, diflucortolone valerate, fluadrenolone, fluclorolone acetonide, flumethasone pivalate, fluosinolone acetonide, fluocinonide, flucortine butylester, fluocortolone, fluprednidene (fluprednylidene) acetate, flurandrenolone, halcinonide, hydrocortisone acetate, hydrocortisone butyrate, methylprednisolone, triamcinolone acetonide, cortisone, cortodoxone, flucetonide, fludrocortisone, difluorosone diacetate, fluradrenolone acetonide, medrysone, amcinafel, amcinafide, betamethasone and the balance of its esters, chloroprednisone, clocortelone, clescinolone, dichlorisone, difluprednate, flucloronide, flunisolide, fluoromethalone, fluperolone, fluprednisolone, hydrocortisone, meprednisone, paramethasone, prednisolone, prednisone, beclomethasone dipropionate. (NSAIDS) that may be used in the present technology, include but are not limited to, salicylic acid, acetyl salicylic acid, methyl salicylate, glycol salicylate, salicylmides, benzyl-2,5-diacetoxybenzoic acid, ibuprofen, fulindac, naproxen, ketoprofen, etofenamate, phenylbutazone, and indomethacin. In some embodiments, the immunosupressive agent may be cytostatics such as alkylating agents, antimetabolites (e.g., azathioprine, methotrexate), cytotoxic antibiotics, antibodies (e.g., basiliximab, daclizumab, and muromonab), anti-immunophilins (e.g., cyclosporine, tacrolimus, sirolimus), inteferons, opioids, TNF binding proteins, mycophenolates, and small biological agents (e.g., fingolimod, myriocin). Additional anti-inflammatory agents are described, for example, in U.S. Pat. No. 4,537,776, the entire contents of which is incorporated by reference herein.

[0640] In some embodiments, the FAP binding agent described herein, include derivatives that are modified, i.e., by the covalent attachment of any type of molecule to the composition such that covalent attachment does not prevent the activity of the composition. For example, but not by way of limitation, derivatives include composition that have been modified by, inter alia, glycosylation, lipidation, acetylation, pegylation, phosphorylation, amidation, derivatization by known protecting/blocking groups, proteolytic cleavage, linkage to a cellular ligand or other protein, etc. Any of numerous chemical modifications can be carried out by known techniques, including, but not limited to specific chemical cleavage, acetylation, formylation, metabolic synthesis of tunicamycin, etc.

[0641] In still other embodiments, the FAP binding agent described herein further comprise a cytotoxic agent, comprising, in illustrative embodiments, a toxin, a chemotherapeutic agent, a radioisotope, and an agent that causes apoptosis or cell death. Such agents may be conjugated to a composition described herein.

[0642] The FAP binding agent described herein may thus be modified post-translationally to add effector moieties such as chemical linkers, detectable moieties such as for example fluorescent dyes, enzymes, substrates, bioluminescent materials, radioactive materials, and chemiluminescent moieties, or functional moieties such as for example streptavidin, avidin, biotin, a cytotoxin, a cytotoxic agent, and radioactive materials.

[0643] Illustrative cytotoxic agents include, but are not limited to, methotrexate, aminopterin, 6-mercaptopurine, 6-thioguanine, cytarabine, 5-fluorouracil decarbazine; alkylating agents such as mechlorethamine, thioepa chlorambucil, melphalan, carmustine (BSNU), mitomycin C, lomustine (CCNU), 1-methylnitrosourea, cyclothosphamide, mechlorethamine, busulfan, dibromomannitol, streptozotocin, mitomycin C, cis-dichlorodiamine platinum (II) (DDP) cisplatin and carboplatin (paraplatin); anthracyclines include daunorubicin (formerly daunomycin), doxorubicin (adriamycin), detorubicin, carminomycin, idarubicin, epirubicin, mitoxantrone and bisantrene; antibiotics include dactinomycin (actinomycin D), bleomycin, calicheamicin, mithramycin, and anthramycin (AMC); and antimytotic agents such as the vinca alkaloids, vincristine and vinblastine. Other cytotoxic agents include paclitaxel (taxol), ricin, pseudomonas exotoxin, gemcitabine, cytochalasin B, gramicidin D, ethidium bromide, emetine, etoposide, tenoposide, colchicin, dihydroxy anthracin dione, 1-dehydrotestosterone, glucocorticoids, procaine, tetracaine, lidocaine, propranolol, puromycin, procarbazine, hydroxyurea, asparaginase, corticosteroids, mytotane (O, P′-(DDD)), interferons, and mixtures of these cytotoxic agents.

[0644] Further cytotoxic agents include, but are not limited to, chemotherapeutic agents such as carboplatin, cisplatin, paclitaxel, gemcitabine, calicheamicin, doxorubicin, 5-fluorouracil, mitomycin C, actinomycin D, cyclophosphamide, vincristine, bleomycin, VEGF antagonists, EGFR antagonists, platins, taxols, irinotecan, 5-fluorouracil, gemcytabine, leucovorine, steroids, cyclophosphamide, melphalan, vinca alkaloids (e.g., vinblastine, vincristine, vindesine and vinorelbine), mustines, tyrosine kinase inhibitors, radiotherapy, sex hormone antagonists, selective androgen receptor modulators, selective estrogen receptor modulators, PDGF antagonists, TNF antagonists, IL-1 antagonists, interleukins (e.g. IL-12 or IL-2), IL-12R antagonists, Toxin conjugated monoclonal antibodies, tumor antigen specific monoclonal antibodies, Erbitux, Avastin, Pertuzumab, anti-CD20 antibodies, Rituxan, ocrelizumab, ofatumumab, DXL625, HERCEPTIN®, or any combination thereof. Toxic enzymes from plants and bacteria such as ricin, diphtheria toxin and Pseudomonas toxin may be conjugated to the therapeutic agents (e.g. antibodies) to generate cell-type-specific-killing reagents (Youle, et al., Proc. Nat'l Acad. Sci. USA 77:5483 (1980); Gilliland, et al., Proc. Nat'l Acad. Sci. USA 77:4539 (1980); Krolick, et al., Proc. Nat'l Acad. Sci. USA 77:5419 (1980)).

[0645] Other cytotoxic agents include cytotoxic ribonucleases as described by Goldenberg in U.S. Pat. No. 6,653,104. Embodiments of the present technology also relate to radioimmunoconjugates where a radionuclide that emits alpha or beta particles is stably coupled to the FAP binding agent, with or without the use of a complex-forming agent. Such radionuclides include beta-emitters such as Phosphorus-32, Scandium-47, Copper-67, Gallium-67, Yttrium-88, Yttrium-90, Iodine-125, Iodine-131, Samarium-153, Lutetium-177, Rhenium-186 or Rhenium-188, and alpha-emitters such as Astatine-211, Lead-212, Bismuth-212, Bismuth-213 or Actinium-225.

[0646] Illustrative detectable moieties further include, but are not limited to, horseradish peroxidase, acetylcholinesterase, alkaline phosphatase, beta-galactosidase and luciferase. Further illustrative fluorescent materials include, but are not limited to, rhodamine, fluorescein, fluorescein isothiocyanate, umbelliferone, dichlorotriazinylamine, phycoerythrin and dansyl chloride. Further illustrative chemiluminescent moieties include, but are not limited to, luminol. Further illustrative bioluminescent materials include, but are not limited to, luciferin and aequorin. Further illustrative radioactive materials include, but are not limited to, Iodine-125, Carbon-14, Sulfur-35, Tritium and Phosphorus-32.

[0647] Methods of Treatment

[0648] Methods and compositions described herein have application to treating various diseases and disorders, including, but not limited to cancer, infections, immune disorders, fibrotic diseases, inflammatory diseases or conditions, anemia, autoimmune diseases, cardiovascular diseases, wound healing, ischemia-related diseases, neurodegenerative diseases, metabolic diseases and many other diseases and disorders.

[0649] Further, any of the present agents may be for use in the treating, or the manufacture of a medicament for treating, various diseases and disorders, including, but not limited to cancer, infections, immune disorders, inflammatory diseases or conditions, fibrotic diseases, and autoimmune diseases.

[0650] In some embodiments, the present invention relates to the treatment of, or a patient having one or more of chronic granulomatous disease, osteopetrosis, idiopathic pulmonary fibrosis, Friedreich's ataxia, atopic dermatitis, Chagas disease, cancer, heart failure, autoimmune disease, sickle cell disease, thalassemia, blood loss, transfusion reaction, diabetes, vitamin B12 deficiency, collagen vascular disease, Shwachman syndrome, thrombocytopenic purpura, Celiac disease, endocrine deficiency state such as hypothyroidism or Addison's disease, autoimmune disease such as Crohn's Disease, systemic lupus erythematosis, rheumatoid arthritis or juvenile rheumatoid arthritis, ulcerative colitis immune disorders such as eosinophilic fasciitis, hypoimmunoglobulinemia, or thymoma/thymic carcinoma, graft versus host disease, preleukemia, Nonhematologic syndrome (e.g., Down's, Dubowwitz,

[0651] Seckel), Felty syndrome, hemolytic uremic syndrome, myelodysplasic syndrome, nocturnal paroxysmal hemoglobinuria, osteomyelofibrosis, pancytopenia, pure red-cell aplasia, Schoenlein-Henoch purpura, malaria, protein starvation, menorrhagia, systemic sclerosis, liver cirrhosis, hypometabolic states, and congestive heart failure.

[0652] In some embodiments, the present invention relates to the treatment of, or a patient having one or more of chronic granulomatous disease, osteopetrosis, idiopathic pulmonary fibrosis, Friedreich's ataxia, atopic dermatitis, Chagas disease, mycobacterial infections, cancer, scleroderma, hepatitis, hepatitis C, septic shock, and rheumatoid arthritis.

[0653] In some embodiments, the present technology relates to the treatment of, or a patient having cancer. As used herein, cancer refers to any uncontrolled growth of cells that may interfere with the normal functioning of the bodily organs and systems, and includes both primary and metastatic tumors. Primary tumors or cancers that migrate from their original location and seed vital organs can eventually lead to the death of the subject through the functional deterioration of the affected organs. A metastasis is a cancer cell or group of cancer cells, distinct from the primary tumor location, resulting from the dissemination of cancer cells from the primary tumor to other parts of the body. Metastases may eventually result in death of a subject. For example, cancers can include benign and malignant cancers, polyps, hyperplasia, as well as dormant tumors or micrometastases.

[0654] Illustrative cancers that may be treated include, but are not limited to, leukemias (including, for example, acute myeloid, acute lymphoblastic, chronic myeloid, chronic lymphocytic, and hairy cell), lymphomas and myelomas (including, for example, Hodgkin and non-Hodgkin lymphomas, light chain, non-secretory, MGUS, and plasmacytomas), and central nervous system cancers (including, for example, brain (e.g., gliomas (e.g., astrocytoma, oligodendroglioma, and ependymoma), meningioma, pituitary adenoma, and neuromas, and spinal cord tumors (e.g., meningiomas and neurofibroma).

[0655] Illustrative cancers that may be treated include, but are not limited to, basal cell carcinoma, biliary tract cancer; bladder cancer; bone cancer; brain and central nervous system cancer; breast cancer; cancer of the peritoneum; cervical cancer; choriocarcinoma; colon and rectum cancer; connective tissue cancer; cancer of the digestive system; endometrial cancer; esophageal cancer; eye cancer; cancer of the head and neck; gastric cancer (including gastrointestinal cancer); glioblastoma; hepatic carcinoma; hepatoma; intra-epithelial neoplasm; kidney or renal cancer; larynx cancer; leukemia; liver cancer; lung cancer (e.g., small-cell lung cancer, non-small cell lung cancer, adenocarcinoma of the lung, and squamous carcinoma of the lung); melanoma; myeloma; neuroblastoma; oral cavity cancer (lip, tongue, mouth, and pharynx); ovarian cancer; pancreatic cancer; prostate cancer; retinoblastoma; rhabdomyosarcoma; rectal cancer; cancer of the respiratory system; salivary gland carcinoma; sarcoma; skin cancer; squamous cell cancer; stomach cancer; testicular cancer; thyroid cancer; uterine or endometrial cancer; cancer of the urinary system; vulval cancer; lymphoma including Hodgkin's and non-Hodgkin's lymphoma, as well as B-cell lymphoma (including low grade/follicular non-Hodgkin's lymphoma (NHL); small lymphocytic (SL) NHL; intermediate grade/follicular NHL; intermediate grade diffuse NHL; high grade immunoblastic NHL; high grade lymphoblastic NHL; high grade small non-cleaved cell NHL; bulky disease NHL; mantle cell lymphoma; AIDS-related lymphoma; and Waldenstrom's Macroglobulinemia; chronic lymphocytic leukemia (CLL); acute lymphoblastic leukemia (ALL); acute myeloid leukemia (AML); Hairy cell leukemia; chronic myeloblastic leukemia; as well as other carcinomas and sarcomas; and post-transplant lymphoproliferative disorder (PTLD), as well as abnormal vascular proliferation associated with phakomatoses, edema (e.g. that associated with brain tumors), and Meigs' syndrome.

[0656] In some embodiments, the present technology provides FAP binding agents that are part of a chimera or Fc-based chimeric protein complex that further comprises modified signaling agents for the treatment of cancer. In some embodiments, the FAP binding agents of the present technology significantly reduce and/or eliminate tumors. In some embodiments, the present FAP binding agents significant reduce and/or eliminate tumors when administered to a subject in combination with other anti-cancer agents such as chemotherapeutic agents, checkpoint inhibitors, and immunosuppressive agents. In some embodiments, the combination of FAP binding agents and other anti-cancer agents synergistically reduced tumor size and/or eliminated tumor cells.

[0657] In some embodiments, the present technology relates to cancer combination therapies with a FAP binding agent that is part of a chimera or Fc-based chimeric protein complex comprising one or more targeting moieties and one or more modified signaling agents. Accordingly, the present technology provides for chimeric or fusion proteins or Fc-based chimeric protein complexes that include, for example, a targeting moiety against FAP and one or more signaling agents and uses thereof in combination with anti-cancer agents.

[0658] For instance, in some embodiments, the present technology pertains to combination therapies for cancer involving chimeras or Fc-based chimeric protein complexes of a FAP binding agent described herein and a modified signaling agent, including, without limitation a mutated human interferon, such as IFN alpha, including human interferon alpha 2.

[0659] In other embodiments, the present FAP binding agent is part of a chimera or Fc-based chimeric protein complex that comprises multiple targeting moieties and therefore be present in bispecific or trispecific formats. For instance, in some embodiments, the present technology pertains to combination therapies for cancer involving chimeras or Fc-based chimeric protein complex of a FAP binding agent and a checkpoint inhibitor binding agent (e.g. anti-PD-L1, anti-PD-1, anti-PD-L2, or anti-CTLA) described herein and a modified signaling agent, including, without limitation a mutated human interferon, such as IFN alpha, including human interferon alpha 2.

[0660] In some embodiments, the signaling agent is modified to have reduced affinity or activity for one or more of its receptors, which allows for attenuation of activity (inclusive of agonism or antagonism) and/or prevents non-specific signaling or undesirable sequestration of the chimeric protein or Fc-based chimeric protein complex. In some embodiments, the reduced affinity or activity at the receptor is restorable by attachment with one or more of the targeting moieties described herein or upon inclusion in the Fc-based chimeric protein complex as disclosed herein.

[0661] In some embodiments, the present technology relates to the treatment of, or a patient having a microbial infection and/or chronic infection. Illustrative infections include, but are not limited to, HIV/AIDS, tuberculosis, osteomyelitis, hepatitis B, hepatitis C, Epstein-Barr virus or parvovirus, T cell leukemia virus, bacterial overgrowth syndrome, fungal or parasitic infections.

[0662] In some embodiments, the present compositions are used to treat or prevent one or more inflammatory diseases or conditions, such as inflammation, acute inflammation, chronic inflammation, respiratory disease, atherosclerosis, restenosis, asthma, allergic rhinitis, atopic dermatitis, septic shock, rheumatoid arthritis, inflammatory bowel disease, inflammatory pelvic disease, pain, ocular inflammatory disease, celiac disease, Leigh Syndrome, Glycerol Kinase Deficiency, Familial eosinophilia (FE), autosomal recessive spastic ataxia, laryngeal inflammatory disease; Tuberculosis, Chronic cholecystitis, Bronchiectasis, Silicosis and other pneumoconioses.

[0663] In some embodiments, the present technology has application to treating autoimmune and/or neurodegenerative diseases.

[0664] In some embodiments, the present compositions are used to treat or prevent one or more conditions characterized by undesirable CTL activity, and/or conditions characterized by high levels of cell death. For instance, in some embodiments, the present compositions are used to treat or prevent one or more conditions associated with uncontrolled or overactive immune response.

[0665] In some embodiments, the present compositions are used to treat or prevent one or more autoimmune and/or neurodegenerative diseases or conditions, such as MS, diabetes mellitus, lupus, celiac disease, Crohn's disease, ulcerative colitis, Guillain-Barre syndrome, scleroderms, Goodpasture's syndrome, Wegener's granulomatosis, autoimmune epilepsy, Rasmussen's encephalitis, Primary biliary sclerosis, Sclerosing cholangitis, Autoimmune hepatitis, Addison's disease, Hashimoto's thyroiditis, Fibromyalgia, Menier's syndrome; transplantation rejection (e.g., prevention of allograft rejection) pernicious anemia, rheumatoid arthritis, systemic lupus erythematosus, dermatomyositis, Sjogren's syndrome, lupus erythematosus, myasthenia gravis, Reiter's syndrome, Grave's disease, and other autoimmune diseases.

[0666] In some embodiments, the present technology is used to treat or prevent various autoimmune and/or neurodegenerative diseases. In some embodiments, the autoimmune and/or neurodegenerative diseases selected from MS, Alzheimer's disease (including, without limitation, Early-onset Alzheimer's, Late-onset Alzheimer's, and Familial Alzheimer's disease (FAD), Parkinson's disease and parkinsonism (including, without limitation, Idiopathic Parkinson's disease, Vascular parkinsonism, Drug-induced parkinsonism, Dementia with Lewy bodies, Inherited Parkinson's, Juvenile Parkinson's), Huntington's disease, Amyotrophic lateral sclerosis (ALS, including, without limitation, Sporadic ALS, Familial ALS, Western Pacific ALS, Juvenile ALS, Hiramaya Disease).

[0667] In an embodiment, the present invention provides methods for the treatment or prevention of one or more liver disorders, selected from viral hepatitis, alcohol hepatitis, autoimmune hepatitis, alcohol liver disease, fatty liver disease, steatosis, steatohepatitis, non-alcohol fatty liver disease, drug-induced liver disease, cirrhosis, fibrosis, liver failure, drug induced liver failure, metabolic syndrome, hepatocellular carcinoma, cholangiocarcinoma, primary biliary cirrhosis (primary biliary cholangitis), bile capillaries, Gilbert's syndrome, jaundice, and any other liver toxicity-associated indication. In some embodiments, the present invention provides methods for the treatment or prevention of liver fibrosis. In some embodiments, the present invention provides methods for the treatment or prevention of primary sclerosing cholangitis (PSC), chronic liver disease, nonalcoholic fatty liver disease (NAFLD), nonalcoholic steatohepatitis (NASH), hepatitis C infection, alcoholic liver disease, liver damage, optionally due to progressive fibrosis and liver fibrosis. In some embodiments, the present invention provides methods for the treatment or prevention of nonalcoholic steatohepatitis (NASH). In some embodiments, the present invention provides methods that reduce or prevent fibrosis. In some embodiments, the present invention provides methods that reduce or prevent cirrhosis. In some embodiments, the present invention provides methods that reduce or prevent hepatocellular carcinoma.

[0668] In some embodiments, the present invention provides methods that treat or prevent a fibrotic disease is optionally selected from liver fibrosis, lung fibrosis, primary sclerosing cholangitis (PSC), chronic liver disease, nonalcoholic fatty liver disease (NAFLD), nonalcoholic steatohepatitis (NASH), hepatitis C infection, alcoholic liver disease, liver damage, liver cirrhosis, and myelodysplastic syndrome

[0669] In various embodiments, the present invention provides methods for the treatment or prevention of cardiovascular disease, such as a disease or condition affecting the heart and vasculature, including but not limited to, coronary heart disease (CHD), cerebrovascular disease (CVD), aortic stenosis, peripheral vascular disease, atherosclerosis, arteriosclerosis, myocardial infarction (heart attack), cerebrovascular diseases (stroke), transient ischemic attacks (TIA), angina (stable and unstable), atrial fibrillation, arrhythmia, vavular disease, and/or congestive heart failure. In various embodiments, the present invention provides methods for the treatment or prevention of cardiovascular disease which involves inflammation.

[0670] In various embodiments, the present invention provides methods for the treatment or prevention of one or more respiratory diseases, such as asthma, chronic obstructive pulmonary disease (COPD), bronchiectasis, allergic rhinitis, sinusitis, pulmonary vasoconstriction, inflammation, allergies, impeded respiration, respiratory distress syndrome, cystic fibrosis, pulmonary hypertension, pulmonary vasoconstriction, emphysema, Hantavirus pulmonary syndrome (HPS), Loeffler's syndrome, Goodpasture's syndrome, Pleurisy, pneumonitis, pulmonary edema, pulmonary fibrosis, Sarcoidosis, complications associated with respiratory syncitial virus infection, and other respiratory diseases.

[0671] In some embodiments, methods of the present technology are useful in treatment a human subject. In some embodiments, the human is a pediatric human. In other embodiments, the human is an adult human. In other embodiments, the human is a geriatric human. In other embodiments, the human may be referred to as a patient. In some embodiments, the human is a female. In some embodiments, the human is a male.

[0672] In certain embodiments, the human has an age in a range of from about 1 to about 18 months old, from about 18 to about 36 months old, from about 1 to about 5 years old, from about 5 to about 10 years old, from about 10 to about 15 years old, from about 15 to about 20 years old, from about 20 to about 25 years old, from about 25 to about 30 years old, from about 30 to about 35 years old, from about 35 to about 40 years old, from about 40 to about 45 years old, from about 45 to about 50 years old, from about 50 to about 55 years old, from about 55 to about 60 years old, from about 60 to about 65 years old, from about 65 to about 70 years old, from about 70 to about 75 years old, from about 75 to about 80 years old, from about 80 to about 85 years old, from about 85 to about 90 years old, from about 90 to about 95 years old or from about 95 to about 100 years old. In some embodiments, the human has an age of more than 30 years old.

[0673] Immune Modulation

[0674] In some embodiments, the present compositions are capable of, or find use in methods of, immune modulation. For example, in some embodiments, the present methods of treatment may involve the immune modulation described herein. In some embodiments, the immune modulation involves IFN signaling, including modified IFN signaling, in the context of a dendritic cell (DC).

[0675] In some embodiments, a multi-specific FAP binding agent is provided. In some embodiments, such multi-specific FAP binding agent of the present technology recognizes and binds to FAP and one or more antigens found on one or more immune cells, which can include, without limitation, megakaryocytes, thrombocytes, erythrocytes, mast cells, basophils, neutrophils, eosinophils, monocytes, macrophages, natural killer cells, T lymphocytes (e.g., cytotoxic T lymphocytes, T helper cells, natural killer T cells), B lymphocytes, plasma cells, dendritic cells, or subsets thereof. In some embodiments, the FAP binding agent specifically binds to an antigen of interest and effectively directly or indirectly recruits one of more immune cells.

[0676] In some embodiments, the FAP binding agent specifically binds to an antigen of interest and effectively directly or indirectly recruits one of more immune cells to cause an immunosuppressive effect, e.g. the FAP binding agent directly or indirectly recruits an immunosuppressive immune cell. In some embodiments, the immunosuppressive immune cell is a regulatory T cell (or “Tregs” which, as used herein, refers to a subpopulation of T cells which modulate the immune system, abrogate autoimmune disease, maintain tolerance to self-antigens and thwart anti-tumor immune responses). Other immunosuppressive immune cells include myeloid suppressor cells (or “MSC,” which, as used herein, refers to a heterogeneous population of cells, defined by their myeloid origin, immature state, and ability to potently suppress T cell responses); tumor associated neutrophils (or “TANs” which, as used herein, refers to a subset of neutrophils that are capable of suppressing immune responses); tumor associated macrophages (or “TAMs” which, as used herein, refers to a subset of macrophages that may reduce an immune response), M2 macrophages, and/or tumor-inducing mast cells (which as used herein, refers to a subset of bone marrow-derived, long-lived, heterogeneous cellular population). Also, immunosuppressive immune cells include Th2 cells and Th17 cells. Additionally, immunosuppressive immune cells include immune cells, e.g., CD4+ and/or CD8+ T cells, expressing one or more checkpoint inhibitory receptors (e.g. receptors, including CTLA-4, B7-H3, B7-H4, TIM-3, expressed on immune cells that prevent or inhibit uncontrolled immune responses). See Stagg, J. et. al., Immunotherapeutic approach in triple-negative breast cancer. Ther Adv Med Oncol. (2013) 5(3):169-181).

[0677] In some embodiments, the FAP binding agent stimulates regulatory T cell (Treg) proliferation. Treg cells are characterized by the expression of the Foxp3 (Forkhead box p3) transcription factor. Most Treg cells are CD4+and CD25+, and can be regarded as a subset of helper T cells, although a small population may be CD8+. Thus the immune response which is to be modulated by a method of the present technology may comprise inducing proliferation of Treg cells, optionally in response to an antigen. Thus the method may comprise administering to the subject a composition comprising the antigen, wherein the antigen is associated with a binding agent having affinity for FAP. The antigen may be administered with an adjuvant which promotes proliferation of Treg cells.

[0678] Insofar as this method involves stimulating proliferation and differentiation of Treg cells in response to a specific antigen, it can be considered to be a method of stimulating an immune response. However, given that Treg cells may be capable of modulating the response of other cells of the immune system against an antigen in other ways, e.g. inhibiting or suppressing their activity, the effect on the immune system as a whole may be to modulate (e.g. suppress or inhibit) the response against that antigen. Thus, the methods of this aspect of the present technology can equally be referred to as methods of modulating (e.g. inhibiting or suppressing) an immune response against an antigen.

[0679] In some embodiments, the methods therapeutically or prophylactically inhibit or suppress an undesirable immune response against a particular antigen, even in a subject with pre-existing immunity or an on-going immune response to that antigen. This may be particularly useful, for example, in the treatment of autoimmune disease.

[0680] Under certain conditions, it may also be possible to tolerize a subject against a particular antigen by targeting the antigen to an antigen presenting cell expressing FAP. The present technology thus provides a method for inducing tolerance in a subject towards an antigen, comprising administering to the subject a composition comprising the antigen, wherein the antigen is associated with a binding agent having affinity for FAP and wherein the antigen is administered in the absence of an adjuvant. Tolerance in this context typically involves depletion of immune cells which would otherwise be capable of responding to that antigen, or inducing a lasting reduction in responsiveness to an antigen in such immune cells.

[0681] It may be particularly desirable to raise a Treg response against an antigen to which the subject exhibits, or is at risk of developing, an undesirable immune response. For example, it may be a self-antigen against which an immune response occurs in an autoimmune disease. Examples of autoimmune diseases in which specific antigens have been identified as potentially pathogenically significant include multiple sclerosis (myelin basic protein), insulin-dependent diabetes mellitus (glutamic acid decarboxylase), insulin-resistant diabetes mellitus (insulin receptor), celiac disease (gliadin), bullous pemphigoid (collagen type XVII), auto-immune haemolytic anaemia (Rh protein), auto-immune thrombocytopenia (GpIIb/IIIa), myaesthenia gravis (acetylcholine receptor), Graves' disease (thyroid-stimulating hormone receptor), glomerulonephritis, such as Goodpasture's disease (alpha3(IV)NC1 collagen), and pernicious anaemia (intrinsic factor). Alternatively, the target antigen may be an exogenous antigen which stimulates a response which also causes damage to host tissues. For example, acute rheumatic fever is caused by an antibody response to a Streptococcal antigen which cross-reacts with a cardiac muscle cell antigen. Thus, these antigens, or particular fragments or epitopes thereof, may be suitable antigens for use in the present technology.

[0682] In some embodiments, the present agents, or methods using these agents, disrupt FAP signaling (e.g. via neutralization of FAP), e.g. by reducing or inhibiting FAP binding to its ligand. Some autoimmune diseases are characterized by unusually high levels of cell death and it is believed that immune responses against self antigens associated with these cells may contribute to the pathogenesis of these conditions. FAP antagonists may therefore be used to prevent FAP from binding to the ligand exposed in dead and dying cells (e.g. those undergoing immunogenic cell death) and may thus inhibit or prevent stimulation of immune responses against these antigens.

[0683] In some embodiments, the present agents, or methods using these agents, reduce or suppress autoreactive T cells. In some embodiments, the multi-specific FAP binding agent, optionally through an interferon signaling in the context of a chimera or Fc-based chimeric protein complex, causes this immunosuppression. In some embodiments, the multi-specific FAP binding agent stimulates PD-L1 or PD-L2 signaling and/or expression which may suppress autoreactive T cells. In some embodiments, the FAP binding agent, optionally through an interferon signaling in the context of a chimera or Fc-based chimeric protein complex, causes this immunosuppression. In some embodiments, the FAP binding agent stimulates PD-L1 or PD-L2 signaling and/or expression which may suppress autoreactive T cells.

[0684] In some embodiments, the present methods comprise modulating the ratio of regulatory T cells to effector T cells in favor of immunosuppression, for instance, to treat autoimmune diseases. For instance, the present methods, in some embodiments, reduce and/or suppress one or more of cytotoxic T cells; effector memory T cells; central memory T cells; CD8+stem cell memory effector cells; TH1 effector T-cells; TH2 effector T cells; TH9 effector T cells; TH17 effector T cells. For instance, the present methods, in some embodiments, increase and/or stimulate one or more of CD4+CD25+FOXP3+regulatory T cells, CD4+CD25+ regulatory T cells, CD4+CD25− regulatory T cells, CD4+CD25high regulatory T cells, TIM-3+PD-1+ regulatory T cells, lymphocyte activation gene-3 (LAG-3)′ regulatory T cells, CTLA-4/CD152+ regulatory T cells, neuropilin-1 (Nrp-1)±regulatory T cells, CCR4+CCR8+ regulatory T cells, CD62L (L-selectin)′ regulatory T cells, CD45RBlow regulatory T cells, CD127low regulatory T cells, LRRC32/GARP+ regulatory T cells, CD39+ regulatory T cells, GITR+ regulatory T cells, LAP′ regulatory T cells, 1B11+ regulatory T cells, BTLA+ regulatory T cells, type 1 regulatory T cells (Tr1 cells),T helper type 3 (Th3) cells, regulatory cell of natural killer T cell phenotype (NKTregs), CD8+ regulatory T cells, CD8+CD28− regulatory T cells and/or regulatory T-cells secreting IL-10, IL-35, TGF-3, TNF-a, Galectin-1, I FN-y and/or MCP1.

[0685] In some embodiments, the present methods favor immune inhibitory signals over immune stimulatory signals. In some embodiments, the present methods allow for reversing or suppressing immune activating or co-stimulatory signals. In some embodiments, the present methods allow for providing immune inhibitory signals. For instance, in some embodiments, the present agents and methods reduce the effects of an immune stimulatory signal, which, without limitation, is one or more of 4-1BB, OX-40, HVEM, GITR, CD27, CD28, CD30, CD40, ICOS ligand; OX-40 ligand, LIGHT (CD258), GITR ligand, CD70, B7-1, B7-2, CD30 ligand, CD40 ligand, ICOS, ICOS ligand, CD137 ligand and TL1A. Further, in some embodiments, the present agents and methods increase the effects of an immune inhibitory signal, which, without limitation, is one or more of CTLA-4, PD-L1, PD-L2, PD-1, BTLA, HVEM, TI M3, GAL9, LAG3, VISTA, KIR, 2B4, CD160 (also referred to as BY55), CGEN-15049, CHK 1 and CHK2 kinases, A2aR, CEACAM (e.g., CEACAM-1, CEACAM-3 and/or CEACAM-5), and various B-7 family ligands (including, but are not limited to, B7-1, B7-2, B7-DC, B7-H1, B7-H2, B7-H3, B7-H4, B7-H5, B7-H6 and B7-H7.

[0686] Kits

[0687] The present technology also provides kits for the administration of any FAP binding agent described herein (e.g. with or without additional therapeutic agents). The kit is an assemblage of materials or components, including at least one of the inventive pharmaceutical compositions described herein. Thus, in some embodiments, the kit contains at least one of the pharmaceutical compositions described herein.

[0688] The exact nature of the components configured in the kit depends on its intended purpose. In one embodiment, the kit is configured for the purpose of treating human subjects.

[0689] Instructions for use may be included in the kit. Instructions for use typically include a tangible expression describing the technique to be employed in using the components of the kit to effect a desired therapeutic outcome, such as to treat cancer. Optionally, the kit also contains other useful components, such as, diluents, buffers, pharmaceutically acceptable carriers, syringes, catheters, applicators, pipetting or measuring tools, bandaging materials or other useful paraphernalia as will be readily recognized by those of skill in the art.

[0690] The materials and components assembled in the kit can be provided to the practitioner stored in any convenience and suitable ways that preserve their operability and utility. For example, the components can be provided at room, refrigerated or frozen temperatures. The components are typically contained in suitable packaging materials. In some embodiments, the packaging material is constructed by well-known methods, preferably to provide a sterile, contaminant-free environment. The packaging material may have an external label which indicates the contents and/or purpose of the kit and/or its components.

[0691] Definitions

[0692] As used herein, “a,” “an,” or “the” can mean one or more than one.

[0693] Further, the term “about” when used in connection with a referenced numeric indication means the referenced numeric indication plus or minus up to 10% of that referenced numeric indication. For example, the language “about 50” covers the range of 45 to 55.

[0694] As used herein, the term “effective amount” refers to a quantity sufficient to achieve a desired therapeutic and/or prophylactic effect, e.g., an amount which results in the prevention of, or a decrease in a disease or disorder or one or more signs or symptoms associated with a disease or disorder. In the context of therapeutic or prophylactic applications, the amount of a composition administered to the subject will depend on the degree, type, and severity of the disease and on the characteristics of the individual, such as general health, age, sex, body weight and tolerance to drugs. The skilled artisan will be able to determine appropriate dosages depending on these and other factors. The compositions can also be administered in combination with one or more additional therapeutic compounds. In the methods described herein, the therapeutic compounds may be administered to a subject having one or more signs or symptoms of a disease or disorder.

[0695] As used herein, something is “decreased” if a read-out of activity and/or effect is reduced by a significant amount, such as by at least about 10%, at least about 20%, at least about 30%, at least about 40%, at least about 50%, at least about 60%, at least about 70%, at least about 80%, at least about 90%, at least about 95%, at least about 97%, at least about 98%, or more, up to and including at least about 100%, in the presence of an agent or stimulus relative to the absence of such modulation. As will be understood by one of ordinary skill in the art, in some embodiments, activity is decreased and some downstream read-outs will decrease but others can increase.

[0696] Conversely, activity is “increased” if a read-out of activity and/or effect is increased by a significant amount, for example by at least about 10%, at least about 20%, at least about 30%, at least about 40%, at least about 50%, at least about 60%, at least about 70%, at least about 80%, at least about 90%, at least about 95%, at least about 97%, at least about 98%, or more, up to and including at least about 100% or more, at least about 2-fold, at least about 3-fold, at least about 4-fold, at least about 5-fold, at least about 6-fold, at least about 7-fold, at least about 8-fold, at least about 9-fold, at least about 10-fold, at least about 50-fold, at least about 100-fold, in the presence of an agent or stimulus, relative to the absence of such agent or stimulus.

[0697] As referred to herein, all compositional percentages are by weight of the total composition, unless otherwise specified. As used herein, the word “include,” and its variants, is intended to be non-limiting, such that recitation of items in a list is not to the exclusion of other like items that may also be useful in the compositions and methods of this technology. Similarly, the terms “can” and “may” and their variants are intended to be non-limiting, such that recitation that an embodiment can or may comprise certain elements or features does not exclude other embodiments of the present technology that do not contain those elements or features.

[0698] Although the open-ended term “comprising,” as a synonym of terms such as including, containing, or having, is used herein to describe and claim the present technology, the present technology, or embodiments thereof, may alternatively be described using alternative terms such as “consisting of” or “consisting essentially of.”

[0699] As used herein, the words “preferred” and “preferably” refer to embodiments of the technology that afford certain benefits, under certain circumstances. However, other embodiments may also be preferred, under the same or other circumstances. Furthermore, the recitation of one or more preferred embodiments does not imply that other embodiments are not useful, and is not intended to exclude other embodiments from the scope of the technology.

[0700] As used herein, a “therapeutically effective amount,” or “pharmacologically effective amount,” or “pharmacologically effective dose” of a compound refers to compound levels in which the physiological effects of a disease or disorder are, at a minimum, ameliorated. Therapeutic benefit also includes halting or slowing the progression of the underlying disease or disorder, regardless of whether improvement is realized. A therapeutically effective amount can be given in one or more administrations. The amount of a compound which constitutes a therapeutically effective amount will vary depending on the compound, the disorder and its severity, and the general health, age, sex, body weight and tolerance to drugs of the subject to be treated, but can be determined routinely by one of ordinary skill in the art.

[0701] Effective amounts, toxicity, and therapeutic efficacy can be determined by standard pharmaceutical procedures in cell cultures or experimental animals, e.g., for determining the LD50 (the dose lethal to about 50% of the population) and the ED50 (the dose therapeutically effective in about 50% of the population). The dosage can vary depending upon the dosage form employed and the route of administration utilized. The dose ratio between toxic and therapeutic effects is the therapeutic index and can be expressed as the ratio LD50/ED50. In some embodiments, compositions and methods that exhibit large therapeutic indices are preferred. A therapeutically effective dose can be estimated initially from in vitro assays, including, for example, cell culture assays. Also, a dose can be formulated in animal models to achieve a circulating plasma concentration range that includes the IC50 as determined in cell culture, or in an appropriate animal model. Levels of the described compositions in plasma can be measured, for example, by high performance liquid chromatography. The effects of any particular dosage can be monitored by a suitable bioassay. The dosage can be determined by a physician and adjusted, as necessary, to suit observed effects of the treatment.

[0702] In certain embodiments, the effect will result in a quantifiable change of at least about 10%, at least about 20%, at least about 30%, at least about 50%, at least about 70%, or at least about 90%. In some embodiments, the effect will result in a quantifiable change of about 10%, about 20%, about 30%, about 50%, about 70%, or even about 90% or more. Therapeutic benefit also includes halting or slowing the progression of the underlying disease or disorder, regardless of whether improvement is realized.

[0703] As used herein, “methods of treatment” are equally applicable to use of a composition for treating the diseases or disorders described herein and/or compositions for use and/or uses in the manufacture of a medicaments for treating the diseases or disorders described herein.

### EXAMPLES

[0704] The term Actaferon (AFN) is occasionally used herein to reference a chimeric protein described herein (details are provided in the Examples regarding the format of the chimeric protein).

### Example 1

### Generation of Human FAP VHH Library

[0705] A llama was subcutaneously injected on days 0, 7, 14, 21, 28 and 35, each time with about 200 μg recombinant human FAPa extracellular domain. On day 40, about 100 ml anticoagulated blood was collected from the llama for lymphocyte preparation. A VHH library was constructed from these lymphocytes to screen for the presence of antigen-specific VHHs. The library was panned on solid-phase coated antigen (100 μg/ml in 100 mM NaHCO3 pH 8.2) for 3 rounds. Based on sequence data of the positive colonies, 96 different full length VHHs were distinguished, belonging to 13 different CDR3 groups (see Table 6, SEQ ID Nos: 2-42, 46-86, and 837-850).

TABLE 6

| Group | Member(s) |
|---|---|
| 1 | 2PE2, 2PE5, 2PE7, 2PE13, 2PE14, 2PE17, 2PE19, 2PE20, 2PE23, 2PE25, 2PE27, 2PE28, 2PE29, 2PE30, |
| | 2PE32, 2PE33, 2PE36, 2PE38, 2PE39, 2PE40, 2PE41, 2PE42, 2PE43, 2PE44, 2PE47, 2PE49, 2PE55, 2PE56, |
| | 2PE58, 2PE59, 2PE60, 2PE61, 2PE62, 2PE63, 2PE67, 2PE68, 2PE71, 2PE72, 2PE76, 2PE83, 2PE84, 2PE86, |
| | 2PE87, 2PE88, 2PE95, 3PE1, 3PE5, 3PE12, 3PE21, 3PE28, 3PE42, 3PE43, 3PE44, 3PE47, 3PE49, 3PE57, |
| | 3PE62, 3PE69, 3PE72, 3PE77, 3PE82, 3PE90, 3PE92, 3PE93, 3PE94 |
| 2 | 2PE18, 2PE22, 2PE26, 3PE4, 3PE16, 3PE22, 3PE25, 3PE26, 3PE33, 3PE46, 3PE55, 3PE61, 3PE63, 3PE70 |
| 3 | 2PE1, 2PE35, 3PE11 |
| 4 | 2PE48, 3PE60 |
| 5 | 2PE34, 3PE80 |
| 6 | 2PE54, 3PE81 |
| 7 | 2PE10, 3PE66 |
| 8 | 2PE31 |
| 9 | 2PE79 |
| 10 | 2PE91 |
| 11 | 3PE38 |
| 12 | 2PE57 |
| 13 | 3PE15 |

### Example 2

### Characterisation Human FAP VHHs

[0706] Expression-vectors (pMECS) encoding the 96 human FAP binding VHHs from Example 1 were transformed to WK6 cells. VHHs (with a C-terminal His-tag) were expressed in periplasmic extracts upon IPTG overnight stimulation. These extracts were applied in a FACS binding-assay: HEK293T cells were transiently transfected with plasmids encoding human FAP plasmid (pMET7 FLAG-hFAP), mouse FAP (pMET7 FLAG-mFAP) or an empty vector (MOCK) as control. Two days after transfections, cells were resuspended and incubated with a 1 over 5 dilution periplasmic extracts in FACS buffer (PBS +0.5 mM EDTA +3% FBS). VHH binding was detected using a FITC-coupled anti-His Ab (GENSCRIPT). Samples were acquired with a MACSQuant X instrument (MILTENYI BIOTEC) and analyzed using the FlowLogic software (MILTENYI BIOTEC). Data are summarized in FIG. 1.

[0707] A selection of 11 VHHs were studied in more detail for binding to human, mouse and cynomolgus FAP as described above. In brief, differently transfected HEK293T cells were incubated with a serial dilution of metal-affinity based purified VHHs for two hours.

[0708] Binding was detected using an FITC-coupled anti-His Ab (Genscript) in FACS. Surprisingly, the VHHs were cross-reactive to human, mouse and cynomolgus. Data showing VHH cross-reactive to human, mouse and cynomolgus FAP are summarized in FIG. 2. The data for 2PE14 is shown in FIG. 2A, the data for 2PE17 is shown in FIG. 2B, the data for 2PE36 is shown in FIG. 2C, the data for 2PE40 is shown in FIG. 2D, the data for 2PE42 is shown in FIG. 2E, the data for 2PE44 is shown in FIG. 2F, the data for 3PE12 is shown in FIG. 2G, the data for 3PE42 is shown in FIG. 2H, the data for 3PE57 is shown in FIG. 2I, the data for 3PE93 is shown in FIG. 2J, and the data for 3PE94 is shown in FIG. 2K

### Example 3

### Human FAP ActaFerons (AFNs)

[0709] Based on affinity for human, mouse and cynomolgus monkey FAP, three FAP VHH were selected for evaluation in a heterodimeric, ‘knob-in-hole Fc’ AFN context: 2PE14, 3PE12 and 3PE42. To this end, FAP VHH sequences were, via the flexible 20*GGS-linker and in the pcDNA3.4 expression vector, fused to the human IgG1 Fc sequence containing the L234A_L235A_K322Q effector mutations and the ‘hole’ modifications Y349C_T366S_L368A_Y407V (see sequences below). Second AFN partner, also cloned in the pcDNA3.4 vector, consists of the fusion between the human IgG1 Fc sequence containing the L234A_L235A_K322Q effector mutations and the ‘knob’ modifications S354C_T366W and the hIFNa2 sequence with the AFN mutation R149A and the O-glycosylation mutation T106E.

[0710] To produce the heterodimeric, ‘knob-in-hole’ AFNs, a combination of both plasmids was transfected in ExpiCHO cells (THERMOFISHER) according to the manufacturers instructions. Seven days post transfection, recombinant proteins were purified using protein A spin plates (THERMOFISHER), quantified and purity tested using SDS-PAGE.

[0711] Biological activity of resulting AFNs (2PE14-AFN, 3PE12-AFN, and 3PE42-AFN) was measured on parental HL116 cells (an IFN responsive cell-line stably transfected with a p6-16 luciferase reporter) and the derived, stably transfected HL116-hFAP cells. Cells were seeded overnight and stimulated for 6 hours with a serial dilution FAP VHH AFN. Luciferase activity was measured on an EnSight Multimode Plate Reader (Perkin Elmer). Data in FIG. 3 clearly illustrate that FAP targeting results in IFN-like signalling in HL116-hFAP cells, while in parental HL116 cells hardly any reporter activation could be observed. Of note, HL116 and HL116-hFAP cells are comparable sensitive to wild type IFNa2.

[0712] The structure for 2PE14 AFN:
[0713] hFAP VHH 2PE14—20*GGS—hIgG1 Fc L234A L235A K322Q Y349C T366S L368A Y407V

[0714] Amino acid sequence for 2PE14 AFN (the amino acid sequence for hFAP VHH 2PE14 is shown in bold letters, the amino acid sequence for 20*GGS linker is shown in italicized letters, and the amino acid sequence for hIgG1 Fc_L234A_L235A_K322Q_Y349C_T366S_L368A_Y407V is shown in underlined letters):

(SEQ ID NO: 1038)
QVQLQESGGGLVQPGGSLRLSCAASGSTFSINAVAWYRQAPGKRRELVAGI
SGGGVTNYPDSVKGRFTISRDNAKNTVYLQMSSLKPEDTAVYYCNLWPPRA
SPGGRVYWGQGTQVTVSSGGSGGSGGSGGSGGSGGSGGSGGSGGSGGSGGS
GGSGGSGGSGGSGGSGGSGGSGGSGGSDKTHTCPPCPAPEAAGGPSVFLFP
PKPKDTLMISRTPEVTCVVVDVSHEDPEVKFNWYVDGVEVHNAKTKPREEQ
YNSTYRWVSVLTVLHQDWLNGKEYKCQVSNKALPAPIEKTISKAKGQPREP
QVCTLPPSRDELTKNQVSLSCAVKGFYPSDIAVEWESNGQPENNYKTTPPV
LDSDGSFFLVSKLTVDKSRWQQGNVFSCSVMHEALHNHYTQKSLSLSPGK

[0715] The structure for 3PE12 AFN:
[0716] hFAP VHH 3PE12 - 20*GGS - hIgG1 Fc L234A L235A K322Q Y349C T366S L368A Y407V

[0717] Amino acid sequence for 3PE12 AFN (the amino acid sequence for hFAP VHH 3PE12 is shown in bold letters, the amino acid sequence for 20*GGS linker is shown in italicized letters, and the amino acid sequence for hIgG1 Fc_L234A_L235A_K322Q_Y349C_T366S_L368A_Y407V is shown in underlined letters):

(SEQ ID NO: 1039)
QVQLQESGGGLVQPGGSLRLSCAASGSTFSGNAMAWYRQAPGKRRELVAGI
SGGGVTNYPDSVKGRFTISRDNAKNTVYLQMSSLKPEDTAVYYCNLWPPRV
SPGGGVYWGQGTQVTVSSGGSGGSGGSGGSGGSGGSGGSGGSGGSGGSGGS
GGSGGSGSGGSGGSGGSGGSGGSGGSDKTHTCPPCPAPEAAGGPSVFLFPP
KPKDTLMISRTPEVTCVVVDVSHEDPEVKFNWYVDGVEVHNAKTKPREEQY
NSTYRWVSVLTVLHQDWLNGKEYKCQVSNKALPAPIEKTISKAKGQPREPQ
VCTLPPSRDELTKNQVSLSCAVKGFYPSDIAVEWESNGQPENNYKTTPPVL
DSDGSFFLVSKLTVDKSRWQQGNVFSCSVMHEALHNHYTQKSLSLSPGK

[0718] The structure for 3PE42 AFN:
[0719] hFAP VHH 3PE42-20*GGS—hIgG1 Fc L234A L235A K322Q Y349C T366S L368A Y407V

[0720] Amino acid sequence for 3PE12 AFN (the amino acid sequence for hFAP VHH 3PE42 is shown in bold letters, the amino acid sequence for 20*GGS linker is shown in italicized letters, and the amino acid sequence for hIgG1 Fc_L234A_L235A_K322Q_Y349C_T366S_L368A_Y407V is shown in underlined letters):

(SEQ ID NO: 1040)
QVQLQESGGGLVQPGESLRLSCAVSGSTSSMNAMAWYRQAPGKRRELVAGI
SGGGATNYPDSVKGRFTISRDNAKNTVYLQMSSLKPEDTAVYYCNLWPPRA
SPGGGVYWGQGTQVTVSSGGSGGSGGSGGSGGSGGSGGSGGSGGSGGSGGS
GGSGGSGGSGGSGGSGGSGGSGGSGGSDKTHTCPPCPAPEAAGGPSVFLFP
PKPKDTLMISRTPEVTCVVVDVSHEDPEVKFNWYVDGVEVHNAKTKPREEQ
YNSTYRWVSVLTVLHQDWLNGKEYKCQVSNKALPAPIEKTISKAKGQPREP
QVCTLPPSRDELTKNQVSLSCAVKGFYPSDIAVEWESNGQPENNYKTTPPV
LDSDGSFFLVSKLTVDKSRWQQGNVFSCSVMHEALHNHYTQKSLSLSPGK

[0721] hIgG1 Fc_L234A_L235A_K322Q_S354C_T366W—20*GGS—hIFNa2 T106E R149A

(SEQ ID NO: 1041)
DKTHTCPPCPAPEAAGGPSVFLFPPKPKDTLMISRTPEVTCVVDVSHEDPE
VKFNWYVDGVEVHNAKTKPREEQYNSTYRVVSVLTVLHQDWLNGKEYKCQV
SNKALPAPIEKTISKAKGQPREPQVYTLPPCRDELTKNQVSLWCLVKGFYP
SDIAVEWESNGQPENNYKTTPPVLDSDGSFFLYSKLTVDKSRWQQGNVFSC
SVMHEALHNHYTQKSLSLSPGKGGSGGSGGSGGSGGSGGSGGSGGSGGSGG
SGGSGGSGGSGGSGGSGGSGGSGGSGGSGGSCDLPQTHSLGSRRTLMLLAQ
MRKISLFSCLKDRHDFGFPQEEFGNQFQKAETIPVLHEMIQQIFNLFSTKD
SSAAWDETLLDKFYTELYQQLNDLEACVIQGVGVEETPLMKEDSILAVRKY
FQRITLYLKEKKYSPCAWEVVRAEIMASFSLSTNLQESLRSKE

### Example 4

### Humanization of FAP VHH Sequences

[0722] In this example, the sequence of two FAP VHHs 2PE14 and 3PE42 are humanized. Humanization is evaluated with four ‘opt’ variants (sequences P-1902 to P-1905) which contain a combination of the following mutations: Q1D, Q5V, P60A, A74S, S82N, K83R, and Q108L. Further, both VHHs contain a deamidation site (N32) in CDR1, and VHH 3PE42 an extra oxidation motif (M31), also in CDR1. Both sequence instabilities were removed by individual mutation to any other amino acid (except C or P; sequences P-1906 to P-1922 for the deamidation, and P-1924 to P-1941 for the oxidation motif). Sequences, ordered with Twist Biosciences, were cloned with a C-terminal His-tag in the pET28 vector and transformed in BL21 cells. VHHs were expressed upon overnight IPTG stimulation and purified from the periplasmic extracts using HisPur Cobalt Spin Plates (ThermoFisher) according to the manufacturers guidelines. Affinity of the resulting VHHs for FAP was measured using the bio-layer interferometry (BLI) technology on an Octet RED96 instrument (ForteBio).

[0723] In brief, recombinant FAP protein (BioLegend) was biotinylated using the Antibody Biotinylation Kit for IP (Pierce) and used to load

[0724] Streptavidin sensors (ForteBio). Association and dissociation of three concentrations (10, 5 and 2.5 nM) FAP VHH were monitored and used to calculate the association and dissociation constants and hence the affinity. Results for the FAP VHH variants are summarized in Table 7. Preferred mutations of N32 include F, Q, R and W. Preferred mutations for M31 include A, D, K, L, N, Q, R, S and W.

TABLE 7

| Variation | P-number | Variant | KD (M) |
|---|---|---|---|
| Wild type | P-1901 | pET28 PelB-2PE14 | 6.67E−10 |
| Humanisation | P-1902 | pET28 PelB-2PE14_opt1 | 9.51E−11 |
| | | (Q1D_Q5V_A74S_K83R_Q108L) | |
| | P-1903 | pET28 PelB-2PE14_opt2 (idem + P60A) | 2.26E−09 |
| | P-1904 | pET28 PelB-2PE14_opt3 (idem + S82N) | 6.53E−10 |
| | P-1905 | pET28 PelB-2PE14_opt4 (idem + P60A_S82N) | 3.76E−09 |
| Randomisation of NA | P-1906 | pET28 PelB-2PE14_N32A | 3.56E−09 |
| deamidation motif in | P-1907 | pET28 PelB-2PE14_N32D | 1.08E−08 |
| 2PE14 | P-1908 | pET28 PelB-2PE14_N32E | 1.09E−09 |
| | P-1909 | pET28 PelB-2PE14_N32F | 4.68E−10 |
| | P-1910 | pET28 PelB-2PE14_N32G | 4.62E−09 |
| | P-1911 | pET28 PelB-2PE14_N32H | 3.69E−09 |
| | P-1912 | pET28 PelB-2PE14_N32I | 1.68E−08 |
| | P-1913 | pET28 PelB-2PE14_N32K | 2.67E−09 |
| | P-1914 | pET28 PelB-2PE14_N32L | 1.25E−09 |
| | P-1915 | pET28 PelB-2PE14_N32P | 1.17E−09 |
| | P-1916 | pET28 PelB-2PE14_N32Q | 3.86E−10 |
| | P-1917 | pET28 PelB-2PE14_N32R | 3.17E−10 |
| | P-1918 | pET28 PelB-2PE14_N32S | 5.56E−07 |
| | P-1919 | pET28 PelB-2PE14_N32T | 4.11E−09 |
| | P-1920 | pET28 PelB-2PE14_N32V | 1.00E−07 |
| | P-1921 | pET28 PelB-2PE14_N32W | 2.21E−10 |
| | P-1922 | pET28 PelB-2PE14_N32Y | 1.45E−08 |
| Wild type | P-1923 | pET28 PelB-3PE42 | 5.88E−10 |
| Randomisation of M | P-1924 | pET28 PelB-3PE42_M42A | 8.89E−11 |
| oxidation motif in | P-1925 | pET28 PelB-3PE42_M42D | 1.65E−10 |
| 3PE42 | P-1926 | pET28 PelB-3PE42_M42E | 1.85E−09 |
| | P-1927 | pET28 PelB-3PE42_M42F | 1.17E−09 |
| | P-1928 | pET28 PelB-3PE42_M42G | 4.02E−09 |
| | P-1929 | pET28 PelB-3PE42_M42H | 1.12E−09 |
| | P-1930 | pET28 PelB-3PE42_M42I | 2.87E−09 |
| | P-1931 | pET28 PelB-3PE42_M42K | 8.51E−10 |
| | P-1932 | pET28 PelB-3PE42_M42L | 8.72E−10 |
| | P-1933 | pET28 PelB-3PE42_M42N | 5.67E−10 |
| | P-1934 | pET28 PelB-3PE42_M42P | 1.34E−09 |
| | P-1935 | pET28 PelB-3PE42_M42Q | 2.14E−10 |
| | P-1936 | pET28 PelB-3PE42_M42R | 2.76E−11 |
| | P-1937 | pET28 PelB-3PE42_M42S | 6.13E−10 |
| | P-1938 | pET28 PelB-3PE42_M42T | 1.16E−09 |
| | P-1939 | pET28 PelB-3PE42_M42V | 2.45E−09 |
| | P-1940 | pET28 PelB-3PE42_M42W | 9.45E−11 |
| | P-1941 | pET28 PelB-3PE42_M42Y | 1.12E−09 |

Sequences:

• P-1901: 2PE14
QVQLQESGGGLVQPGGSLRLSCAASGSTFSINAVAWYRQAPGKRRELVAGISGGGVTNYPDSVKGRFTISRDNAKNT
VYLQMSSLKPEDTAVYYCNLWPPRASPGGRVYWGQGTQVTVSS (SEQ ID NO: 1045)
• P-1902: 2PE14_opt1 (Q1D_Q5V_A74S_K83R_Q108L; bold letters show the mutation)
DVQLVESGGGLVQPGGSLRLSCAASGSTFSINAVAWYRQAPGKRRELVAGISGGGVTNYPDSVKGRFTISRDNSKNTV
YLQMSSLRPEDTAVYYCNLWPPRASPGGRVYWGQGTLVTVSS (SEQ ID NO: 1046)
• P-1903: 2PE14_opt2 (Q1D_Q5V_P60A_A74S_K83R_Q108L; bold letters show the mutation)
DVQLVESGGGLVQPGGSLRLSCAASGSTFSINAVAWYRQAPGKRRELVAGISGGGVTNYADSVKGRFTISRDNSKNT
VYLQMSSLRPEDTAVYYCNLWPPRASPGGRVYWGQGTLVTVSS (SEQ ID NO: 1047)
• P-1904: 2PE14_opt3 (Q1 D_Q5V_A74S_S82N_K83R_Q108L; bold letters show the mutation)
DVQLVESGGGLVQPGGSLRLSCAASGSTFSINAVAWYRQAPGKRRELVAGISGGGVTNYPDSVKGRFTISRDNSKNTV
YLQMNSLRPEDTAVYYCNLWPPRASPGGRVYWGQGTLVTVSS (SEQ ID NO: 1048)
• P-1905: 2PE14_opt4 (Q1D_Q5V_P60A_A74S_S82N_K83R_Q108L; bold letters show the mutation)
DVQLVESGGGLVQPGGSLRLSCAASGSTFSINAVAWYRQAPGKRRELVAGISGGGVTNYADSVKGRFTISRDNSKNT
VYLQMNSLRPEDTAVYYCNLWPPRASPGGRVYWGQGTLVTVSS (SEQ ID NO: 1049)
• P-1906: 2PE14_N32A (bold letters show the mutation)
QVQLQESGGGLVQPGGSLRLSCAASGSTFSIAAVAWYRQAPGKRRELVAGISGGGVTNYPDSVKGRFTISRDNAKNT
VYLQMSSLKPEDTAVYYCNLWPPRASPGGRVYWGQGTQVTVSS (SEQ ID NO: 1050)
• P-1907: 2PE14_N32D (bold letters show the mutation)
QVQLQESGGGLVQPGGSLRLSCAASGSTFSIDAVAWYRQAPGKRRELVAGISGGGVTNYPDSVKGRFTISRDNAKNT
VYLQMSSLKPEDTAVYYCNLWPPRASPGGRVYWGQGTQVTVSS (SEQ ID NO: 1051)
• P-1908: 2PE14_N32E (bold letters show the mutation)
QVQLQESGGGLVQPGGSLRLSCAASGSTFSIEAVAWYRQAPGKRRELVAGISGGGVTNYPDSVKGRFTISRDNAKNT
VYLQMSSLKPEDTAVYYCNLWPPRASPGGRVYWGQGTQVTVSS (SEQ ID NO: 1052)
• P-1909: 2PE14_N32F (bold letters show the mutation)
QVQLQESGGGLVQPGGSLRLSCAASGSTFSIFAVAWYRQAPGKRRELVAGISGGGVTNYPDSVKGRFTISRDNAKNT
VYLQMSSLKPEDTAVYYCNLWPPRASPGGRVYWGQGTQVTVSS (SEQ ID NO: 1053)
• P-1910: 2PE14_N32G (bold letters show the mutation)
• QVQLQESGGGLVQPGGSLRLSCAASGSTFSIGAVAWYRQAPGKRRELVAGISGGGVTNYPDSVKGRFTISRDNAKNT
VYLQMSSLKPEDTAVYYCNLWPPRASPGGRVYWGQGTQVTVSS (SEQ ID NO: 1054)
• P-1911: 2PE14_N32H (bold letters show the mutation)
QVQLQESGGGLVQPGGSLRLSCAASGSTFSIHAVAWYRQAPGKRRELVAGISGGGVTNYPDSVKGRFTISRDNAKNT
VYLQMSSLKPEDTAVYYCNLWPPRASPGGRVYWGQGTQVTVSS (SEQ ID NO: 1055)
• P-1912: 2PE14_N32I (bold letters show the mutation)
QVQLQESGGGLVQPGGSLRLSCAASGSTFSIIAVAWYRQAPGKRRELVAGISGGGVTNYPDSVKGRFTISRDNAKNTV
YLQMSSLKPEDTAVYYCNLWPPRASPGGRVYWGQGTQVTVSS (SEQ ID NO: 1056)
• P-1913: 2PE14_N32K (bold letters show the mutation)
QVQLQESGGGLVQPGGSLRLSCAASGSTFSIKAVAWYRQAPGKRRELVAGISGGGVTNYPDSVKGRFTISRDNAKNT
VYLQMSSLKPEDTAVYYCNLWPPRASPGGRVYWGQGTQVTVSS (SEQ ID NO: 1057)
• P-1914: 2PE14_N32L (bold letters show the mutation)
QVQLQESGGGLVQPGGSLRLSCAASGSTFSILAVAWYRQAPGKRRELVAGISGGGVTNYPDSVKGRFTISRDNAKNT
VYLQMSSLKPEDTAVYYCNLWPPRASPGGRVYWGQGTQVTVSS (SEQ ID NO: 1058)
• P-1915: 2PE14_N32P (bold letters show the mutation)
QVQLQESGGGLVQPGGSLRLSCAASGSTFSIPAVAWYRQAPGKRRELVAGISGGGVTNYPDSVKGRFTISRDNAKNT
VYLQMSSLKPEDTAVYYCNLWPPRASPGGRVYWGQGTQVTVSS (SEQ ID NO: 1059)
• P-1916: 2PE14_N32Q (bold letters show the mutation)
QVQLQESGGGLVQPGGSLRLSCAASGSTFSIQAVAWYRQAPGKRRELVAGISGGGVTNYPDSVKGRFTISRDNAKNT
VYLQMSSLKPEDTAVYYCNLWPPRASPGGRVYWGQGTQVTVSS (SEQ ID NO: 1060)
• P-1917: 2PE14_N32R (bold letters show the mutation)
QVQLQESGGGLVQPGGSLRLSCAASGSTFSIRAVAWYRQAPGKRRELVAGISGGGVTNYPDSVKGRFTISRDNAKNT
VYLQMSSLKPEDTAVYYCNLWPPRASPGGRVYWGQGTQVTVSS (SEQ ID NO: 1061)
• P-1918: 2PE14_N32S (bold letters show the mutation)
QVQLQESGGGLVQPGGSLRLSCAASGSTFSISAVAWYRQAPGKRRELVAGISGGGVTNYPDSVKGRFTISRDNAKNT
VYLQMSSLKPEDTAVYYCNLWPPRASPGGRVYWGQGTQVTVSS (SEQ ID NO: 1062)
• P-1919: 2PE14_N32T (bold letters show the mutation)
QVQLQESGGGLVQPGGSLRLSCAASGSTFSITAVAWYRQAPGKRRELVAGISGGGVTNYPDSVKGRFTISRDNAKNT
VYLQMSSLKPEDTAVYYCNLWPPRASPGGRVYWGQGTQVTVSS (SEQ ID NO: 1063)
• P-1920: 2PE14_N32V (bold letters show the mutation)
QVQLQESGGGLVQPGGSLRLSCAASGSTFSIVAVAWYRQAPGKRRELVAGISGGGVTNYPDSVKGRFTISRDNAKNT
VYLQMSSLKPEDTAVYYCNLWPPRASPGGRVYWGQGTQVTVSS (SEQ ID NO: 1064)
• P-1921: 2PE14_N32W (bold letters show the mutation)
QVQLQESGGGLVQPGGSLRLSCAASGSTFSIWAVAWYRQAPGKRRELVAGISGGGVTNYPDSVKGRFTISRDNAKNT
VYLQMSSLKPEDTAVYYCNLWPPRASPGGRVYWGQGTQVTVSS (SEQ ID NO: 1065)
• P-1922: 2PE14_N32Y (bold letters show the mutation)
QVQLQESGGGLVQPGGSLRLSCAASGSTFSIYAVAWYRQAPGKRRELVAGISGGGVTNYPDSVKGRFTISRDNAKNT
VYLQMSSLKPEDTAVYYCNLWPPRASPGGRVYWGQGTQVTVSS (SEQ ID NO: 1066)
• P-1923: 3PE42 (bold letters show the mutation)
QVQLQESGGGLVQPGESLRLSCAVSGSTSSMNAMAWYRQAPGKRRELVAGISGGGATNYPDSVKGRFTISRDNAKN
TVYLQMSSLKPEDTAVYYCNLWPPRASPGGGVYWGQGTQVTVSS (SEQ ID NO: 1067)
• P-1924: 3PE42_M31A (bold letters show the mutation)
QVQLQESGGGLVQPGESLRLSCAVSGSTSSANAMAWYRQAPGKRRELVAGISGGGATNYPDSVKGRFTISRDNAKN
TVYLQMSSLKPEDTAVYYCNLWPPRASPGGGVYWGQGTQVTVSS (SEQ ID NO: 1068)
• P-1925: 3PE42_M31D (bold letters show the mutation)
QVQLQESGGGLVQPGESLRLSCAVSGSTSSDNAMAWYRQAPGKRRELVAGISGGGATNYPDSVKGRFTISRDNAKN
TVYLQMSSLKPEDTAVYYCNLWPPRASPGGGVYWGQGTQVTVSS (SEQ ID NO: 1069)
• P-1926: 3PE42_M31E (bold letters show the mutation)
QVQLQESGGGLVQPGESLRLSCAVSGSTSSENAMAWYRQAPGKRRELVAGISGGGATNYPDSVKGRFTISRDNAKNT
VYLQMSSLKPEDTAVYYCNLWPPRASPGGGVYWGQGTQVTVSS (SEQ ID NO: 1070)
• P-1927: 3PE42_M31F (bold letters show the mutation)
QVQLQESGGGLVQPGESLRLSCAVSGSTSSFNAMAWYRQAPGKRRELVAGISGGGATNYPDSVKGRFTISRDNAKNT
VYLQMSSLKPEDTAVYYCNLWPPRASPGGGVYWGQGTQVTVSS (SEQ ID NO: 1071)
• P-1928: 3PE42_M31G (bold letters show the mutation)
QVQLQESGGGLVQPGESLRLSCAVSGSTSSGNAMAWYRQAPGKRRELVAGISGGGATNYPDSVKGRFTISRDNAKN
TVYLQMSSLKPEDTAVYYCNLWPPRASPGGGVYWGQGTQVTVSS (SEQ ID NO: 1072)
• P-1929: 3PE42_M31H (bold letters show the mutation)
QVQLQESGGGLVQPGESLRLSCAVSGSTSSHNAMAWYRQAPGKRRELVAGISGGGATNYPDSVKGRFTISRDNAKN
TVYLQMSSLKPEDTAVYYCNLWPPRASPGGGVYWGQGTQVTVSS (SEQ ID NO: 1073)
• P-1930: 3PE42_M31I (bold letters show the mutation)
QVQLQESGGGLVQPGESLRLSCAVSGSTSSINAMAWYRQAPGKRRELVAGISGGGATNYPDSVKGRFTISRDNAKNT
VYLQMSSLKPEDTAVYYCNLWPPRASPGGGVYWGQGTQVTVSS (SEQ ID NO: 1074)
• P-1931: 3PE42_M31K (bold letters show the mutation)
QVQLQESGGGLVQPGESLRLSCAVSGSTSSKNAMAWYRQAPGKRRELVAGISGGGATNYPDSVKGRFTISRDNAKN
TVYLQMSSLKPEDTAVYYCNLWPPRASPGGGVYWGQGTQVTVSS (SEQ ID NO: 1075)
• P-1932: 3PE42_M31L (bold letters show the mutation)
QVQLQESGGGLVQPGESLRLSCAVSGSTSSLNAMAWYRQAPGKRRELVAGISGGGATNYPDSVKGRFTISRDNAKNT
VYLQMSSLKPEDTAVYYCNLWPPRASPGGGVYWGQGTQVTVSS (SEQ ID NO: 1076)
• P-1933: 3PE42_M31N (bold letters show the mutation)
QVQLQESGGGLVQPGESLRLSCAVSGSTSSNNAMAWYRQAPGKRRELVAGISGGGATNYPDSVKGRFTISRDNAKN
TVYLQMSSLKPEDTAVYYCNLWPPRASPGGGVYWGQGTQVTVSS (SEQ ID NO: 1077)
• P-1934: 3PE42_M31P (bold letters show the mutation)
QVQLQESGGGLVQPGESLRLSCAVSGSTSSPNAMAWYRQAPGKRRELVAGISGGGATNYPDSVKGRFTISRDNAKNT
VYLQMSSLKPEDTAVYYCNLWPPRASPGGGVYWGQGTQVTVSS (SEQ ID NO: 1078)
• P-1935: 3PE42_M31Q (bold letters show the mutation)
QVQLQESGGGLVQPGESLRLSCAVSGSTSSQNAMAWYRQAPGKRRELVAGISGGGATNYPDSVKGRFTISRDNAKN
TVYLQMSSLKPEDTAVYYCNLWPPRASPGGGVYWGQGTQVTVSS (SEQ ID NO: 1079)
• P-1936: 3PE42_M31R (bold letters show the mutation)
QVQLQESGGGLVQPGESLRLSCAVSGSTSSRNAMAWYRQAPGKRRELVAGISGGGATNYPDSVKGRFTISRDNAKN
TVYLQMSSLKPEDTAVYYCNLWPPRASPGGGVYWGQGTQVTVSS (SEQ ID NO: 1080)
• P-1937: 3PE42_M31S (bold letters show the mutation)
QVQLQESGGGLVQPGESLRLSCAVSGSTSSSNAMAWYRQAPGKRRELVAGISGGGATNYPDSVKGRFTISRDNAKNT
VYLQMSSLKPEDTAVYYCNLWPPRASPGGGVYWGQGTQVTVSS (SEQ ID NO: 1081)
• P-1938: 3PE42_M31T (bold letters show the mutation)
QVQLQESGGGLVQPGESLRLSCAVSGSTSSTNAMAWYRQAPGKRRELVAGISGGGATNYPDSVKGRFTISRDNAKNT
VYLQMSSLKPEDTAVYYCNLWPPRASPGGGVYWGQGTQVTVSS (SEQ ID NO: 1082)
• P-1939: 3PE42_M31V (bold letters show the mutation)
QVQLQESGGGLVQPGESLRLSCAVSGSTSSVNAMAWYRQAPGKRRELVAGISGGGATNYPDSVKGRFTISRDNAKNT
VYLQMSSLKPEDTAVYYCNLWPPRASPGGGVYWGQGTQVTVSS (SEQ ID NO: 1083)
• P-1940: 3PE42_M31W (bold letters show the mutation)
QVQLQESGGGLVQPGESLRLSCAVSGSTSSWNAMAWYRQAPGKRRELVAGISGGGATNYPDSVKGRFTISRDNAKN
TVYLQMSSLKPEDTAVYYCNLWPPRASPGGGVYWGQGTQVTVSS (SEQ ID NO: 1084)
• P-1941: 3PE42_M31Y (bold letters show the mutation)
QVQLQESGGGLVQPGESLRLSCAVSGSTSSYNAMAWYRQAPGKRRELVAGISGGGATNYPDSVKGRFTISRDNAKNT
VYLQMSSLKPEDTAVYYCNLWPPRASPGGGVYWGQGTQVTVSS (SEQ ID NO: 1085)

### Example 5

### FAP VHH Variants

[0725] In this example, the observations from the humanization (Example 4) were combined to generate six additional VHH variants. In these variants, we combined the humanization mutations (Q1D_Q5V_A74S_K83R_Q108L, with and without S82N), the N32W deamidation mutation, and, in the case of 3PE42, oxidation mutations M42A or M42D. Variants were produced and purified, and affinity measured as described above. Data in FIG. 24 illustrates that combination of these mutations for 2PE14 has no major impact on affinity (2PE14_OptA) or even results in a major affinity increase (2PE14_OptB). For 3PE42 the combination of mutations as in 3PE42_OptB has no major impact on affinity.

Sequences:

• P-1901: 2PE14
QVQLQESGGGLVQPGGSLRLSCAASGSTFSINAVAWYRQAPGKRRELVAGISGGGVTNYPDSVKGRFTISRDNAKNTVYL
QMSSLKPEDTAVYYCNLWPPRASPGGRVYWGQGTQVTVSS (SEQ ID NO: 1045)
• P-2219: 2PE14_OptA (Q1D_Q5V_N32W_A74S_K83R_Q108L)
DVQLVESGGGLVQPGGSLRLSCAASGSTFSIWAVAWYRQAPGKRRELVAGISGGGVTNYPDSVKGRFTISRDNSKNTVYL
QMSSLRPEDTAVYYCNLWPPRASPGGRVYWGQGTLVTVSS (SEQ ID NO: 1086)
• P-2220: 2PE14_OptB (Q1D_Q5V_N32W_A74S_S82N_K83R_Q108L)
DVQLVESGGGLVQPGGSLRLSCAASGSTFSIWAVAWYRQAPGKRRELVAGISGGGVTNYPDSVKGRFTISRDNSKNTVYL
QMNSLRPEDTAVYYCNLWPPRASPGGRVYWGQGTLVTVSS (SEQ ID NO: 1087)
• P-1923: 3PE42
QVQLQESGGGLVQPGESLRLSCAVSGSTSSMNAMAWYRQAPGKRRELVAGISGGGATNYPDSVKGRFTISRDNAKNTVY
LQMSSLKPEDTAVYYCNLWPPRASPGGGVYWGQGTQVTVSS (SEQ ID NO: 1088)
• P-2221: 3PE42_OptA (Q1D_Q5V_M31A_N32W_A74S_K83R_Q108L)
DVQLVESGGGLVQPGGSLRLSCAASGSTSSAWAMAWYRQAPGKRRELVAGISGGGATNYPDSVKGRFTISRDNSKNTVY
LQMSSLRPEDTAVYYCNLWPPRASPGGGVYWGQGTLVTVSS (SEQ ID NO: 1089)
• P-2222: 3PE42_OptB (Q1D_Q5V_M31D_N32W_A74S_K83R_Q108L)
DVQLVESGGGLVQPGGSLRLSCAASGSTSSDWAMAWYRQAPGKRRELVAGISGGGATNYPDSVKGRFTISRDNSKNTVY
LQMSSLRPEDTAVYYCNLWPPRASPGGGVYWGQGTLVTVSS (SEQ ID NO: 1090)
• P-2223: 3PE42_OptC (Q1D_Q5V_M31A_N32W_A74S_S82N_K83R_Q108L)
DVQLVESGGGLVQPGGSLRLSCAASGSTSSAWAMAWYRQAPGKRRELVAGISGGGATNYPDSVKGRFTISRDNSKNTVY
LQMNSLRPEDTAVYYCNLWPPRASPGGGVYWGQGTLVTVSS (SEQ ID NO: 1091)
• P-2224: 3PE42_OptD (Q1D_Q5V_M31D_N32W_A74S_S82N_K83R_Q108L)
DVQLVESGGGLVQPGGSLRLSCAASGSTSSDWAMAWYRQAPGKRRELVAGISGGGATNYPDSVKGRFTISRDNSKNTVY
LQMNSLRPEDTAVYYCNLWPPRASPGGGVYWGQGTLVTVSS (SEQ ID NO: 1092)

### EQUIVALENTS

[0726] While the present technology has been described in connection with specific embodiments thereof, it will be understood that it is capable of further modifications and this application is intended to cover any variations, uses, or adaptations of the present technology following, in general, the principles of the present technology and including such departures from the present disclosure as come within known or customary practice within the art to which the present technology pertains and as may be applied to the essential features hereinbefore set forth and as follows in the scope of the appended claims.

[0727] Those skilled in the art will recognize, or be able to ascertain, using no more than routine experimentation, numerous equivalents to the specific embodiments described specifically herein. Such equivalents are intended to be encompassed in the scope of the following claims.

### INCORPORATION BY REFERENCE

[0728] All patents and publications referenced herein are hereby incorporated by reference in their entireties.

The application's sequence listing, which the Patent Office published only in electronic form, follows.

SEQUENCE LISTING (1129 sequences)

SEQ ID NO: 1 - protein, 760 aa, Artificial Sequence [sequence omitted]

SEQ ID NO: 2 - protein, 120 aa, Artificial Sequence
  Synthetic (2PE2)
QVQLQESGGGSVQVGGSLRLSCADSGSTFTINAMGWYRQAPGKRRDWVAGITSSGVTQYPDSVKGRFTISRDNAKNTVYLQMNSLKPEDTAVYYCNLWPPRASPSGRIYWGQGTQVTVSS

SEQ ID NO: 3 - protein, 120 aa, Artificial Sequence
  Synthetic
QVQLQESGGGLVQPGGSLRLSCAASESTFSINAVAWYRQAPGKRRELVAGISGGGVTSYPDSVKGRFTISRDNAKNIVYLQMSSLKPEDTAVYYCNLWPPRASPGGRVYWGQGTQVTVSS

SEQ ID NO: 4 - protein, 120 aa, Artificial Sequence
  Synthetic
QVQLQESGGGLVHAGGSLRLSCADSGSTFSVNAVGWYRQAPGKRRDWVAGITSDGVTNYPDSVKGRFTISRDNAKNTVYLQMNSLKPEDTAVYYCNLWPPRASPSGRIYWGQGTQVTVSS

SEQ ID NO: 5 - protein, 120 aa, Artificial Sequence
  Synthetic
QVQLQESGGGLVQVGGSLRLSCAASGSTFILNAMAWYRQAPGNRRELVAGISSGGDTNYPDSVKGRFTISRDNANNIVYLQMNSLKLEDTAVYYCNLWPPRASPSGRVYWGQGTQVTVSS

SEQ ID NO: 6 - protein, 120 aa, Artificial Sequence
  Synthetic
QVQLQESGGGLVQPGGSLRLSCAASGSTFSINAVAWYRQAPGKRRELVAGISGGGVTNYPDSVKGRFTISRDNAKNTVYLQMSSLKPEDTAVYYCNLWPPRASPGGRVYWGQGTQVTVSS

SEQ ID NO: 7 - protein, 120 aa, Artificial Sequence
  Synthetic
QVQLQESGGGLVQSGGSLRLSCAASGSTFSINAVAWYRQAPGKRRELVAGISGGGVTNYPDSVKGRFTISRDNAKNTVYLQMSSLKPEDTAVYYCNLWPPRASPGGRVYWGQGTQVTVSS

SEQ ID NO: 8 - protein, 119 aa, Artificial Sequence
  Synthetic
QVQLQESGGGLVQPGGSLRLSCADSGSTFTINAMAWYRQAPGKRRELVAGISGGVTNYPDSVKGRFTISRDNAKNTVYLQMSSLKPEDTAVYYCNLWPPRASPDGRVYWGQGTQVTVSS

SEQ ID NO: 9 - protein, 120 aa, Artificial Sequence
  Synthetic
QVQLQESGGGLVQPGGSLRLSCAASESTFSINAVAWYRQAPGKRRELVAGISGGGVTNYPDSVKGRFTVSRDNAKNIVYLQMSSLKPEDTAVYYCNLWPPRASPGGRVYWGQGTQVTVSS

SEQ ID NO: 10 - protein, 121 aa, Artificial Sequence
  Synthetic
QVQLQESGGGLVQPGGSLRLSCADSGSTFSINNAMGWYRQAPGKRRDWVAGITSSGVTNYPDSVKGRFTISRDNAKNTVYLQMNSLKPEDTAVYYCNLWPPRASPSGTIYWGQGTQVTVSS

SEQ ID NO: 11 - protein, 120 aa, Artificial Sequence
  Synthetic
QVQLQESGGGLVQVGGSLRLSCAASGSSFIINAMGWYRQAPGKRRELVAGISSDGATHYPDSVKGRFTISRDNAKNIVYLQMNSLKPEDTAVYYCNLWPPRASPSGRVYWGQGTQVTVSS

SEQ ID NO: 12 - protein, 120 aa, Artificial Sequence
  Synthetic
QVQLQESGGGLVQPGGSLRLSCAASGSISSINAMAWYRQAPGKRRELVAGIDGGGVTNYPDSVKGRFTISRDNAKNTVYLQMSSLKPEDTAVYYCNLWPPRASPGGRVYWGQGTQVTVSS

SEQ ID NO: 13 - protein, 121 aa, Artificial Sequence
  Synthetic
QVQLQESGGGLVQIGGSLRLSCADSGSTFSINNAMGWYRQAPGKRRDWVAGITSSGVTNYPDSVKGRFTISRDNAKNTVYLQMNSLKPEDTAVYYCNLWPPRASPSGTIYWGQGTQVTVSS

SEQ ID NO: 14 - protein, 120 aa, Artificial Sequence
  Synthetic
QVQLQESGGGLVQPGGSLRLSCAASGSTSSINAMAWYRQAPGKRRELVAGIDGGGVTNYPDSVKGRFTISRDNAKNTVYLQMSSLKPEDTAVYYCNLWPPRASPGGRVYWGQGTQVTVSS

SEQ ID NO: 15 - protein, 121 aa, Artificial Sequence
  Synthetic
QVQLQESGGGLVQVGGSLRLSCADSGSTFSINNAMGWYRQAPGKRRDWVAGITSSGVTNYPDSVKGRFTISRDNAKNTVYLQMNSLKPEDTAVYYCNLWPPRASPSGRIYWGQGTQVTVSS

SEQ ID NO: 16 - protein, 120 aa, Artificial Sequence
  Synthetic
QVQLQESGGGLVQVGGSLRLSCAASGSTFSINAMGWYRQAPGKRRELVAGISSDDITYYPDSVKGRFTISRDNAKNTVYLQMNSLKPEDTAVYYCNLWPPRASPSGRGYWGQGTQVTVSS

SEQ ID NO: 17 - protein, 120 aa, Artificial Sequence
  Synthetic
QVQLQESGGGLVQPGGSLRLSCADSGSTFSINSMGWYRQAPGKRRDWVAGITTDGITKYPDSLKGRFTISRDNAKNTVYLQMNSLKPEDTAVYYCNLWPPRASPSGRLYWGQGTQVTVSS

SEQ ID NO: 18 - protein, 120 aa, Artificial Sequence
  Synthetic
QVQLQESGGGLVQPGGSLRLSCAASGSTFSINAVAWYRQAPGKRRELVAGISGGGVTNYPDSVKGRFTISRDNAKNTVYLQMSSLKPEDTAVYYCNLWPPRASPDGRVYWGQGTQVTVSS

SEQ ID NO: 19 - protein, 120 aa, Artificial Sequence
  Synthetic
  misc_feature (39)..(39): Xaa can be any naturally occurring amino acid
QVQLQESGGGLVQAGESLRLSCAASGSTFTINAMGWYRXAPGKRRDWVAGITSSGVTQYPDSVKGRFTISRDNAKNTVYLQMNSLKPEDTAVYYCNLWPPRASPSGRIYWGQGTQVTVSS

SEQ ID NO: 20 - protein, 120 aa, Artificial Sequence
  Synthetic
QVQLQESGGGLVQVGGSLRLSCADSGSTFSVNAVGWYRQAPGKRRDWVAGITSDGVTNYPDSVKGRFTISRDNAKNTVYLQMNSLKPEDTAVYYCNLWPPRASPSGRIYWGQGTQVTVSS

SEQ ID NO: 21 - protein, 120 aa, Artificial Sequence
  Synthetic
QVQLQESGGGLVQPGGSLRLSCAASESTFSINAVAWYRQAPGKRRELVAGISGGGVTNYPDSVKGRFTISRDNAKNIVYLQMSSLKPEDTAVYYCNLWPPRASPGGRVYWGQGTQVTVSS

SEQ ID NO: 22 - protein, 120 aa, Artificial Sequence
  Synthetic
QVQLQESGGGLVQVGGSLRLSCADSGSTFSINSMGWYRQAPGKHRDWVAGITTDGITKYPDSLKGRFTISRDNAKNTVYLQMNSLKPEDTAVYYCNLWPPRASPSGRLYWGQGTQVTVSS

SEQ ID NO: 23 - protein, 120 aa, Artificial Sequence
  Synthetic
QVQLQESGGGLVQAGGSLRLSCAASGSTFSINAVAWYRQAPGKRRELVAGISGGGVTNYPDSVRGRFTISRDNAKNTVYLQMSSLKPEDTAVYYCNLWPPRASPDGRVYWGQGTQVTVSS

SEQ ID NO: 24 - protein, 120 aa, Artificial Sequence
  Synthetic
QVQLQESGGGLVQPGGSLTLACKGSGVELSRSAMAWYQQAPGKRRDWVAGITSSGVTQYPDSVKGRFTISRDNAKNTVYLQMNSLKPEDAAVYYCNLWPPRASPSGRIYWGQGTQVTVSS

SEQ ID NO: 25 - protein, 120 aa, Artificial Sequence
  Synthetic
QVQLQESGGGLVQPGGSLRLSCAASGSTFSVNAVAWYRQAPGKRRELVAGISGGGVTNYPDSVKGRFTISRDNAKNTVYLQMSSLIPEDTAVYYCNLWPPRASPGGRVYWGQGTQVTVSS

SEQ ID NO: 26 - protein, 121 aa, Artificial Sequence
  Synthetic
QVQLQESGGGLVQVGGSLRLSCAASGSTFSINNAMGWYRQAPGKRREWVAGISSGGVTHYPDSVKGRFTISRDNAKNIVYLQMDSLKPEDTAVYYCNLWPPRASPSGSIYWGQGTQVTVSS

SEQ ID NO: 27 - protein, 120 aa, Artificial Sequence
  Synthetic
QVQLQESGGGLVQAGGSLRLSCTASGSISSINAMAWYRQAPGKRRELVAGIDGGGVTNYPDSVKGRFTISRDNAKNTVYLQMSSLKPEDTAVYYCNLWPPRASPGGRVYWGQGTQVTVSS

SEQ ID NO: 28 - protein, 120 aa, Artificial Sequence
  Synthetic
QVQLQESGGGLVQPGGSLRLSCAASESTFSINAVAWYRQAPGKRRELVAGISGGGVTNHPDSVKGRFTISRDNAKNIVYLQMSSLKPEDTAVYYCNLWPPRASPGGRVYWGQGTQVTVSS

SEQ ID NO: 29 - protein, 120 aa, Artificial Sequence
  Synthetic
QVQLQESGGGLVQPGGSLRLSCADSGSTFTINAMGWYRQAPGKRRDWVAGITSSGVTQYPDSVKGRFTISRDNAKNTVYLQMNSLKPEDTAVYYCNLWPPRASPSGRIYWGQGTQVTVSS

SEQ ID NO: 30 - protein, 120 aa, Artificial Sequence
  Synthetic
QVQLQESGGGLVQVGGSLRLSCAASGSTFSINAMGWYRQAPGKRREWVAGISSSGPPHYPDSVKGRFTISRDNAKNTVYLQMNSLKPEDTAVYYCNLWPPMASPSGAIYWGQGTQVTVSS

SEQ ID NO: 31 - protein, 120 aa, Artificial Sequence
  Synthetic
QVQLQESGGGLVQPGGSLRLSCAVSGSIFSLNAMAWYRQAPGKRRELVAGISGGSVTNYPDSVKGRFTISRDSTKNTVYLQMSSLKPEDTAVYYCNLWPPRASPGGRVYWGQGTQVTVSS

SEQ ID NO: 32 - protein, 120 aa, Artificial Sequence
  Synthetic
QVQLQESGGGLVQPGGSLRLSCAASGSTFSINAMAWYRQAPGKRRELVAGISGGGVTNYPDSVKGRFTISRDNAKNTVYLQMSSLKPEDTAVYYCNLWPPRASPGGRVYWGQGTQVTVSS

SEQ ID NO: 33 - protein, 119 aa, Artificial Sequence
  Synthetic
  misc_feature (39)..(39): Xaa can be any naturally occurring amino acid
QVQLQESGGGLVQPGGSLRLICAASGSTFSGNAMAWYRXAPGKRRELVAGISGGITTYPDSVKGRFTISRDNAKNTVYLQMSSLKPEDTAVYYCNLWPPRASPGGLVYWGQGTQVTVSS

SEQ ID NO: 34 - protein, 121 aa, Artificial Sequence
  Synthetic
QVQLQESGGGLVQAGGSLRLSCADSSGSTFSINAMAWYRQAPGKRRDWVAGITSDSVTKYPDSVKGRFTISRDNAKNTVYLQMNSLKPEDTAVYYCNLWPPRASPSGRIDWGQGTQVTVSS

SEQ ID NO: 35 - protein, 121 aa, Artificial Sequence
  Synthetic
QVQLQESGGGLVQVGGSLRLSCAASGSTFSINNAMGWYRQAPGKRREWVAGISSGGVTHYPDSVKGRFTISRDNAKNIVYLQMNSLKPEDTAVYYCNLWPPRASPSGSIYWGQGTQVTVSS

SEQ ID NO: 36 - protein, 120 aa, Artificial Sequence
  Synthetic
QVQLQESGGGLVQVGGSLRLSCAASGSTFILNAMGWYRQAPGNRRELVAGISSGGDTNYPDSVKGRFTISRDNANNIVYLQMNSLKLEDTAVYYCNLWPPRASPSGRPYWGQGTQVTVSS

SEQ ID NO: 37 - protein, 120 aa, Artificial Sequence
  Synthetic
QVQLQESGGGLVQPGGSLRLSCAASGSIFSTNAMAWYRQAPGKRRELVAGISGGGVTNYPDSVKGRFTISRDNAKNTVYLQMSSLKPEDTAVYYCNLWPPRAPPDGRVYWGQGTQVTVSS

SEQ ID NO: 38 - protein, 120 aa, Artificial Sequence
  Synthetic
QVQLQESGGGMVQSGRSLRLSCLASVNIVNLNSVGWYRQAPGQQRELVASITSAGSTNYAESVKGRFTISRDNSKNTVYLQMNSLKPSDTAVYYCNLWPPRVSPSGRGYWGQGTQVTVSS

SEQ ID NO: 39 - protein, 120 aa, Artificial Sequence
  Synthetic
QVQLQESGGGLVQPGGSLRLSCAASGSISSINAMAWYRQAPGRRRELVAGIDGGGVTNYPDSVKGRFTISRDHAKNTVYLQMSSLKPEDTAVYYCNLWPPRASPGGRVYWGQGTQVTVSS

SEQ ID NO: 40 - protein, 121 aa, Artificial Sequence
  Synthetic
QVQLQESGGGLVQVGGSLRLSCAASGSTFSINNAMGWYRQAPGKRREWVAGISSGGVTHYPDSVKGRFAISRDNAKNIVYLQMDSLKPEDTAVYYCNLWPPRASPSGSIYWGQGTQVTVSS

SEQ ID NO: 41 - protein, 120 aa, Artificial Sequence
  Synthetic
QVQLQESGGGLVQVGGSLRLSCADSGSTFSINSMGWYRQAPGKRRDWVAGITTDGITKYPDSLKGRFTISRDNAKNTVYLQMNSLKPEDTAVYYCNLWPPRASPSGRLYWGQGTQVTVSS

SEQ ID NO: 42 - protein, 120 aa, Artificial Sequence
  Synthetic
QVQLQESGGGLVQAGGSLRLSCAASGSISSLNAMGWYRQAPGKQREWVAGITSGGSTNYADSVKGRFTILRDNAKNTVYLQMSSLKFEDTAVYYCNLWPPRASPSGAVYWGQGTQVTVSS

SEQ ID NO: 43 - protein, 6 aa, Artificial Sequence
  Synthetic
HHHHHH

SEQ ID NO: 44 - protein, 10 aa, Artificial Sequence
  Synthetic
YPYDVPDYGS

SEQ ID NO: 45 - protein, 19 aa, Artificial Sequence
  Synthetic
AAAYPYDVPDYGSHHHHHH

SEQ ID NO: 46 - protein, 120 aa, Artificial Sequence
  Synthetic
QVQLQESGGGLVQVGGSLRLSCADSGSTFSINAMGWYRQAPGKRRDWVAGITSDGVTKYPDSVKGRFTISRDNAKNTVYLQMNSLKPEDTAVYYCNLWPPRVSPSGRIYWGQGTQVTVSS

SEQ ID NO: 47 - protein, 121 aa, Artificial Sequence
  Synthetic
QVQLQESGGGLVQVGGSLRLSCAASGSTFSINNAMGWYRQAPGKRREWVAGISSGGVTHYPDSVKGRFTISRDNAKNIVYLQMDSLKPEDTAAYYCNLWPPRASPSGSIYWGQGTQVTVSS

SEQ ID NO: 48 - protein, 120 aa, Artificial Sequence
  Synthetic
QVQLQESGGGLVQPGGSLRLSCAASESTFSINAVAWYRQAPGKRRELVAGISGGGVTNYPDSVKGRFTISRDNAKNIVYLQMSSLKPEDTAVYYCNLWPPRAPPGGRVYWGQGTQVTVSS

SEQ ID NO: 49 - protein, 120 aa, Artificial Sequence
  Synthetic
QVQLQESGGGLVQVGGSLRLSCADSGSTFSINAMGWYRQAPGKRRDWVAGITSSGVTKYPDSVKGRFTISRDNAKNTVYLQMNSLKPEDTAVYYCNLWPPRASPSGRIYWGQGTQVTVSS

SEQ ID NO: 50 - protein, 120 aa, Artificial Sequence
  Synthetic
QVQLQESGGGLVQAGGSLKLSCAGSGSTFSINAMAWYRQAPGERRELVAGISGDNITNYPDSVKGRFTISRDNAKNTVYLQMSSLKPEDTAVYYCNLWPPRASPGGRVYWGQGTQVTVSS

SEQ ID NO: 51 - protein, 120 aa, Artificial Sequence
  Synthetic
QVQLQESGGGLVQPGGSLRLSCAASGSTFSINAMAWYRQAPGQRRELVAGISGGGVTNYPDSVKGRFTISRDNAKNTVYLQMSSLKPEDTAVYYCNLWPPRASPGGRVYWGQGTQVTVSS

SEQ ID NO: 52 - protein, 120 aa, Artificial Sequence
  Synthetic
QVQLQESGGGLVQPGGSLRLSCAASGSTFSGNAMAWYRQAPGKRRELVAGISGGGVTNYPDSVKGRFTISRDNAKNTVYLQMSSLKPEDTAVYYCNLWPPRVSPGGGVYWGQGTQVTVSS

SEQ ID NO: 53 - protein, 120 aa, Artificial Sequence
  Synthetic
QVQLQESGGGLVQAGESLRLSCAASGRDFRDNSMGWYRQAPGKRREWVAGISSGGVTHYPDSVKGRFTISRDNAKNIVYLQMDSLKPEDTAVYYCNLWPPRASPSGSIYWGQGTQVTVSS

SEQ ID NO: 54 - protein, 120 aa, Artificial Sequence
  Synthetic
QVQLQESGGGLVQPEGSLRLSCAASGSISSINAMAWYRQAPGKRRELVAGIDGGGVTNYPDSVKGRFTISRDNAKNTVYLQMSSLKPEDTAVYYCNLWPPRASPGGRVYWGQGTQVTVSS

SEQ ID NO: 55 - protein, 120 aa, Artificial Sequence
  Synthetic
QVQLQESGGGLVQPGESLRLSCAVSGSTSSMNAMAWYRQAPGKRRELVAGISGGGATNYPDSVKGRFTISRDNAKNTVYLQMSSLKPEDTAVYYCNLWPPRASPGGGVYWGQGTQVTVSS

SEQ ID NO: 56 - protein, 120 aa, Artificial Sequence
  Synthetic
QVQLQESGGGLVQAGGSLRLSCAASGSTFSVNAVAWYRQAPGKRRELVAGISGGGVTNYPDSVKGRFTISRDNAKNTVYLQMSSLKPEDTAVYYCNLWPPRASPDGRVYWGQGTQVTVSS

SEQ ID NO: 57 - protein, 120 aa, Artificial Sequence
  Synthetic
QVQLQESGGGLVQPGGSLRLSCAASGSTFSINAMAWYRQAPGKRRELVAGISGGDVTHYPDSVKGRFTISRDNAKNTVYLQMSSLKPEDTAVYYCNLWPPRASPGGRVYWGQGTQVTVSS

SEQ ID NO: 58 - protein, 120 aa, Artificial Sequence
  Synthetic
QVQLQESGGGLVQPGGSLRLSCAASGSTFSINAVAWYRQAPGKRRELVAGISGGGVTNYPDSVKGRFTISRDNAKNTVYLQMSSLIPEDTAVYYCNLWPPRASPGGRVYWGQGTQVTVSS

SEQ ID NO: 59 - protein, 120 aa, Artificial Sequence
  Synthetic
QVQLQESGGGLVQPGGSLRLSCAGSGSTFSINAMAWYRQAPGERRELVAGISGDNITNYPNSVKGRFTISRDNAKNTVYLQMSSLKPEDTAVYYCNLWPPRASPGGRVYWGQGTQVTVSS

SEQ ID NO: 60 - protein, 120 aa, Artificial Sequence
  Synthetic
QVQLQESGGGLVQPGGSLRLSCAASGSTFSVNAVAWYRQAPGKRRELVAGISGGGVTNYPDSVKGRFTISRDNAKNTVYLQMSSLKPEDTAVYYCNLWPPRASPDGRVYWGQGTQVTVSS

SEQ ID NO: 61 - protein, 120 aa, Artificial Sequence
  Synthetic
QVQLQESGGGLVQPGGSLRLSCAASGSTFSSNAMAWYRQAPGKRRELVAGISGGGVTNYPDSVKGRFTISRDNAKNTVYLQMSSLKPEDTAVYYCNLWPPRASPDGGVYWGQGTQVTVSS

SEQ ID NO: 62 - protein, 120 aa, Artificial Sequence
  Synthetic
QVQLQESGGGLVQPGGSLTLSCTTSEFTLAYFGVGWFRQAPGKRRDWVAGITTDGITKYPDSLKGRFTISRDNAKNTVYLQMNSLKPEDTAVYYCNLWPPRASPSGRLYWGQGTQVTVSS

SEQ ID NO: 63 - protein, 120 aa, Artificial Sequence
  Synthetic
QVQLQESGGGLVQAGGSLRLSCAASGSTFSGNAMAWYRRAPGKRRELVAGISGGGVTNYPDSVKGRFTISRDNAKNTVYLQMSSLKPEDTAVYYCNLWPPRVSPGGRVYWGQGTQVTVSS

SEQ ID NO: 64 - protein, 119 aa, Artificial Sequence
  Synthetic
QVQLQESGGGLVQPGGSLRLSCADSGSTFTINAMAWYRQAPGKRRELVAGISGGVTNYPDSVKGRFTISRDNAKNTVYLQMSSLKPEDTAVYYCNLWPPRASPDGRVYWSQGTQVTVSS

SEQ ID NO: 65 - protein, 120 aa, Artificial Sequence
  Synthetic
QVQLQESGGGLVQPEGSLRLSCAASGSISSINAMAWYRQAPGKRRELVAGIDGGGVTNYPDSVKGRFTISRDNAKNTVYLQMSSLKPEDTAVYYCNLWPPRASPGGRVYWGKGTQVTVSS

SEQ ID NO: 66 - protein, 119 aa, Artificial Sequence
  Synthetic
QVQLQESGGGLVQVGGSLRLSCAASGSTFSINAMGWYRQAPGKRREWVAGITSGVTHYPDSVKGRFTISRDNAKNTVYLQMNSLKPEDTAVYYCNLWPPRASPSGSIYWGQGTQVTVSS

SEQ ID NO: 67 - protein, 121 aa, Artificial Sequence
  Synthetic
QVQLQESGGGLVQVGGSLRLSCAASGSTFSINNAMGWYRQAPGKRREWVAGISSGGVTHYPDSVKGRFTISRDNAKNIVYLQMNSPKPEDTAVYYCNLWPPRASPSGSIYWGQGTQVTVSS

SEQ ID NO: 68 - protein, 120 aa, Artificial Sequence
  Synthetic
QVQLQESGGGLVQPGESLRLSCAVSGSTSSMNAMAWYRQAPGKRRELVAGISGGGATNYPDSMKGRFTISRDNAKNTVYLQMSSLKPEDTAVYYCNLWPPRASPGGGVYWGQGTQVTVSS

SEQ ID NO: 69 - protein, 120 aa, Artificial Sequence; identical to SEQ ID NO: 54
  Synthetic

SEQ ID NO: 70 - protein, 115 aa, Artificial Sequence
  Synthetic
QVQLQESGGGLVQAGGSLRLSCADSGSTFGLSAMGWYRQTPGKQRELVASITSDGRTNYADSVKGRFTISRVNPKRTVYLQMNSLKPDDTAVYVCNARFGIRDFWGQGTQVTVSS

SEQ ID NO: 71 - protein, 115 aa, Artificial Sequence
  Synthetic
QVQLQESGGGLVQPGGSLRLSCADSGSTFGLSAMGWYRQTPGKQRELVASITSDGRTNYADSVKGRFTISRVNPKRTVYLQMNSLKPDDTAVYVCNARFGIRDFWGQGTQVTVSS

SEQ ID NO: 72 - protein, 115 aa, Artificial Sequence
  Synthetic
QVQLQESGGGLVQAGGSLRLSCADSGSTFGLGAMGWYRQSPGKQRELVASITSGGRTNYADSVKGRFTISRVNAKRTVYLQMNSLKPEDTAVYVCNARFGIRDFWGQGTQVTVSS

SEQ ID NO: 73 - protein, 115 aa, Artificial Sequence
  Synthetic
QVQLQESGGGLVQAGGSLRLSCADSGSTFGLGAMGWYRQSPGKQRELVASITSGGRTNYSDSVKGRFTISRVNPKRIVYLQMNSLKPEDTAVYVCNARFGIRDFWGQGTQVTVSS

SEQ ID NO: 74 - protein, 115 aa, Artificial Sequence
  Synthetic
QVQLQESGGGLVQAGGSLRLSCADSGSTFGLSAMGWYRLTPGKQRELVASITSDGRTNYADSVKGRFTISRVNPKRTVYLQMNSLKPDDTAVYVCNARFGIRDFWGQGTQVTVSS

SEQ ID NO: 75 - protein, 115 aa, Artificial Sequence
  Synthetic
QVQLQESGGGLVQPGGSLRLSCADSGSTFGLGAMGWYRQSPGKQRELVASITSGGRTNYADSVKGRFTISRVGAKRTVYLQMNSLKPEDTAVYVCNARFGIRDFWGQGTQVTVSS

SEQ ID NO: 76 - protein, 115 aa, Artificial Sequence
  Synthetic
QVQLQESGGGLVQAGGSLRLSCADSGSTFGLTAIGWYRQSPGKQRELVASITSGGRTNYADSVKGRFTISRVNPKRTVYLQMNSLKPEDTAVYVCNARFGIRDFWGQGTQVTVSS

SEQ ID NO: 77 - protein, 115 aa, Artificial Sequence
  Synthetic
QVQLQESGGGLVQAGGSLRLSCADSGSTFGLGAMGWYRQSPGKQRELVASITSGGRTNYADSVKGRFTISRVGAKRTVYLQMNSLKPEDTAVYVCNARFGIRDFWGQGTQVTVSS

SEQ ID NO: 78 - protein, 115 aa, Artificial Sequence
  Synthetic
QVQLQESGGGLVQAGGSLRLSCADSGSTFGLGAMGWYRQSPGKQRELVASITSGGRTNYADSVKGRFTISRENPKRTVYLQMNSLKPEDTAVYVCNARFGIRDFWGQGTQVTVSS

SEQ ID NO: 79 - protein, 115 aa, Artificial Sequence
  Synthetic
QVQLQESGGGLVQAGGSLRLSCADSGSTFGLGAMGWYRQSPGKQRELVASITSGGRTNYADSVKGRFTISRVGAKRTVYLQMNSLRPEDTAVYVCNARFGIRDFWGQGTQVTVSS

SEQ ID NO: 80 - protein, 115 aa, Artificial Sequence
  Synthetic
QVQLQESGGGLVQAGGSLRLSCADSGSTFGLGAMGWYRQSPGKQRELVASITSGGRTNYADSVKGRFTISRVSAKRTVYLQMNSLKPEDTAVYVCNARFGIRDFWGQGTQVTVSS

SEQ ID NO: 81 - protein, 115 aa, Artificial Sequence
  Synthetic
QVQLQESGGGLVRPGGSLRLSCADSGSTFGLSAMGWYRQSPGKQRELVASIISDGRTNYADSVKGRFTISRVNAKRTVYLQMNSLKPEDTAVYVCNARFGIRDFWGQGTQVTVSS

SEQ ID NO: 82 - protein, 115 aa, Artificial Sequence
  Synthetic
QVQLQESGGGLVQAGGSLRLSCADSGSTFGLSAMGWYRQSPGKQRELVASIISDGRTNYADSVKGRFTISRVNAKRTVYLQMNSLKPEDTAVYVCNARFGIRDFWGQGTQVTVSS

SEQ ID NO: 83 - protein, 115 aa, Artificial Sequence
  Synthetic
QVQLQESGGGLVQAGGSLRLSCADSGSTFGLGAMGWYRQSPGKQRELVASITSGGRTNYSDSVKGRFTISRVTPKRIVYLQMNSLKPEDTAVYVCNARFGIRDFWGQGTQVTVSS

SEQ ID NO: 84 - protein, 116 aa, Artificial Sequence
  Synthetic
QVQLQESGGGLVQAGGSLRLSCAASGSIFGINAVGWYRQAPGKQRELVATFTRGGDINYADSVKGRFTIFRDNAANTVYLQMNSLKAEDTAVYYCNTPPRIGRGYWGQGTQVTVSS

SEQ ID NO: 85 - protein, 116 aa, Artificial Sequence
  Synthetic
QVQLQESGGGLVQVGGSLRLSCAASGSIFGINAVGWYRQAPGKQRELVATFTRGGDINYADSVKGRFTIFRDNAANTVYLQMNSLKAEDTAVYYCNTPPRIGRGYWGQGTQVTVSS

SEQ ID NO: 86 - protein, 116 aa, Artificial Sequence
  Synthetic
QVQLQESGGGLVQPGGSLRLSCAASGSIFGINAVGWYRQAPGKQRELVATFTRGGDINYADSVKGRFTIFRDNAANTVYLQMNSLKAEDTAVYYCNTPPRIGRGYWGQGTQVTVSS

SEQ ID NO: 87 - protein, 10 aa, Artificial Sequence
  Synthetic
ATISSMNSMA

SEQ ID NO: 88 - protein, 10 aa, Artificial Sequence
  Synthetic
EFTLAYFGVG

SEQ ID NO: 89 - protein, 10 aa, Artificial Sequence
  Synthetic
ESTFSINAVA

SEQ ID NO: 90 - protein, 10 aa, Artificial Sequence
  Synthetic
GFIFRSTSMG

SEQ ID NO: 91 - protein, 10 aa, Artificial Sequence
  Synthetic
GGIFTIGPLG

SEQ ID NO: 92 - protein, 10 aa, Artificial Sequence
  Synthetic
GRDFRDNSMG

SEQ ID NO: 93 - protein, 10 aa, Artificial Sequence
  Synthetic
GSIFGINAVG

SEQ ID NO: 94 - protein, 10 aa, Artificial Sequence
  Synthetic
GSIFSLNAMA

SEQ ID NO: 95 - protein, 7 aa, Artificial Sequence
  Synthetic
GSIFSMG

SEQ ID NO: 96 - protein, 10 aa, Artificial Sequence
  Synthetic
GSIFSTNAMA

SEQ ID NO: 97 - protein, 10 aa, Artificial Sequence
  Synthetic
GSISSINAMA

SEQ ID NO: 98 - protein, 10 aa, Artificial Sequence
  Synthetic
GSISSLNAMG

SEQ ID NO: 99 - protein, 10 aa, Artificial Sequence
  Synthetic
GSISSRNAMG

SEQ ID NO: 100 - protein, 10 aa, Artificial Sequence
  Synthetic
GSSFIINAMG

SEQ ID NO: 101 - protein, 10 aa, Artificial Sequence
  Synthetic
GSTARLDAMG

SEQ ID NO: 102 - protein, 10 aa, Artificial Sequence
  Synthetic
GSTFGLGAMG

SEQ ID NO: 103 - protein, 10 aa, Artificial Sequence
  Synthetic
GSTFGLSAMG

SEQ ID NO: 104 - protein, 10 aa, Artificial Sequence
  Synthetic
GSTFGLTAIG

SEQ ID NO: 105 - protein, 10 aa, Artificial Sequence
  Synthetic
GSTFILNAMA

SEQ ID NO: 106 - protein, 10 aa, Artificial Sequence
  Synthetic
GSTFILNAMG

SEQ ID NO: 107 - protein, 10 aa, Artificial Sequence
  Synthetic
GSTFSGNAMA

SEQ ID NO: 108 - protein, 10 aa, Artificial Sequence
  Synthetic
GSTFSINAMA

SEQ ID NO: 109 - protein, 10 aa, Artificial Sequence
  Synthetic
GSTFSINAMG

SEQ ID NO: 110 - protein, 10 aa, Artificial Sequence
  Synthetic
GSTFSINAMM

SEQ ID NO: 111 - protein, 10 aa, Artificial Sequence
  Synthetic
GSTFSINAVA

SEQ ID NO: 112 - protein, 11 aa, Artificial Sequence
  Synthetic
GSTFSINNAMG

SEQ ID NO: 113 - protein, 10 aa, Artificial Sequence
  Synthetic
GSTFSINSMG

SEQ ID NO: 114 - protein, 10 aa, Artificial Sequence
  Synthetic
GSTFSSNAMA

SEQ ID NO: 115 - protein, 10 aa, Artificial Sequence
  Synthetic
GSTFSVNAVA

SEQ ID NO: 116 - protein, 16 aa, Artificial Sequence
  Synthetic
AISSGGSTNYAASVKG

SEQ ID NO: 117 - protein, 16 aa, Artificial Sequence
  Synthetic
AVTSGGVTNYADSVKG

SEQ ID NO: 118 - protein, 16 aa, Artificial Sequence
  Synthetic
GIATDGRTNYAHSVKG

SEQ ID NO: 119 - protein, 16 aa, Artificial Sequence
  Synthetic
GIDGGGVTNYPDSVKG

SEQ ID NO: 120 - protein, 16 aa, Artificial Sequence
  Synthetic
GIDSADITDYARFVKG

SEQ ID NO: 121 - protein, 16 aa, Artificial Sequence
  Synthetic
GIIGSHSTNYADSVKG

SEQ ID NO: 122 - protein, 16 aa, Artificial Sequence
  Synthetic
GISGDNITNYPDSVKG

SEQ ID NO: 123 - protein, 16 aa, Artificial Sequence
  Synthetic
GISGDNITNYPNSVKG

SEQ ID NO: 124 - protein, 16 aa, Artificial Sequence
  Synthetic
GISGGDVTHYPDSVKG

SEQ ID NO: 125 - protein, 16 aa, Artificial Sequence
  Synthetic
GISGGGATNYPDSMKG

SEQ ID NO: 126 - protein, 16 aa, Artificial Sequence
  Synthetic
GISGGGATNYPDSVKG

SEQ ID NO: 127 - protein, 16 aa, Artificial Sequence
  Synthetic
GISGGGVTNHPDSVKG

SEQ ID NO: 128 - protein, 16 aa, Artificial Sequence
  Synthetic
GISGGGVTNYPDSVKG

SEQ ID NO: 129 - protein, 16 aa, Artificial Sequence
  Synthetic
GISGGGVTNYPDSVRG

SEQ ID NO: 130 - protein, 16 aa, Artificial Sequence
  Synthetic
GISGGGVTSYPDSVKG

SEQ ID NO: 131 - protein, 15 aa, Artificial Sequence
  Synthetic
GISGGITTYPDSVKG

SEQ ID NO: 132 - protein, 16 aa, Artificial Sequence
  Synthetic
GISGGSVTNYPDSVKG

SEQ ID NO: 133 - protein, 15 aa, Artificial Sequence
  Synthetic
GISGGVTNYPDSVKG

SEQ ID NO: 134 - protein, 16 aa, Artificial Sequence
  Synthetic
GISSDDITYYPDSVKG

SEQ ID NO: 135 - protein, 16 aa, Artificial Sequence
  Synthetic
GISSDGATHYPDSVKG

SEQ ID NO: 136 - protein, 16 aa, Artificial Sequence
  Synthetic
GISSGGDTNYPDSVKG

SEQ ID NO: 137 - protein, 16 aa, Artificial Sequence
  Synthetic
GISSGGVTHYPDSVKG

SEQ ID NO: 138 - protein, 16 aa, Artificial Sequence
  Synthetic
GISSSGPPHYPDSVKG

SEQ ID NO: 139 - protein, 16 aa, Artificial Sequence
  Synthetic
GITSDGITNYADSVKG

SEQ ID NO: 140 - protein, 16 aa, Artificial Sequence
  Synthetic
GITSDGLGNYVDFVKG

SEQ ID NO: 141 - protein, 16 aa, Artificial Sequence
  Synthetic
GITSDGLGNYVGFAKG

SEQ ID NO: 142 - protein, 16 aa, Artificial Sequence
  Synthetic
GITSDGVTKYPDSVKG

SEQ ID NO: 143 - protein, 16 aa, Artificial Sequence
  Synthetic
GITSDGVTNYPDSVKG

SEQ ID NO: 144 - protein, 16 aa, Artificial Sequence
  Synthetic
GITSDSVTKYPDSVKG

SEQ ID NO: 145 - protein, 17 aa, Artificial Sequence
  Synthetic
AAVVTAKGMGAIQSRGY

SEQ ID NO: 146 - protein, 18 aa, Artificial Sequence
  Synthetic
ADSSRGKIYFSNYRSWNY

SEQ ID NO: 147 - protein, 8 aa, Artificial Sequence
  Synthetic
ARFGIRDF

SEQ ID NO: 148 - protein, 9 aa, Artificial Sequence
  Synthetic
FWPPLYGRP

SEQ ID NO: 149 - protein, 10 aa, Artificial Sequence
  Synthetic
FWPPPSDRPI

SEQ ID NO: 150 - protein, 10 aa, Artificial Sequence
  Synthetic
FWPPPSGRPI

SEQ ID NO: 151 - protein, 9 aa, Artificial Sequence
  Synthetic
KWPPSVPPN

SEQ ID NO: 152 - protein, 13 aa, Artificial Sequence
  Synthetic
LWPPMASPSGAIY

SEQ ID NO: 153 - protein, 13 aa, Artificial Sequence
  Synthetic
LWPPRAPPDGRVY

SEQ ID NO: 154 - protein, 13 aa, Artificial Sequence
  Synthetic
LWPPRAPPGGRVY

SEQ ID NO: 155 - protein, 13 aa, Artificial Sequence
  Synthetic
LWPPRASPDGGVY

SEQ ID NO: 156 - protein, 13 aa, Artificial Sequence
  Synthetic
LWPPRASPDGRVY

SEQ ID NO: 157 - protein, 13 aa, Artificial Sequence
  Synthetic
LWPPRASPGGGVY

SEQ ID NO: 158 - protein, 13 aa, Artificial Sequence
  Synthetic
LWPPRASPGGLVY

SEQ ID NO: 159 - protein, 13 aa, Artificial Sequence
  Synthetic
LWPPRASPGGRVY

SEQ ID NO: 160 - protein, 13 aa, Artificial Sequence
  Synthetic
LWPPRASPSGAVY

SEQ ID NO: 161 - protein, 13 aa, Artificial Sequence
  Synthetic
LWPPRASPSGRGY

SEQ ID NO: 162 - protein, 13 aa, Artificial Sequence
  Synthetic
LWPPRASPSGRID

SEQ ID NO: 163 - protein, 13 aa, Artificial Sequence
  Synthetic
LWPPRASPSGRIY

SEQ ID NO: 164 - protein, 13 aa, Artificial Sequence
  Synthetic
LWPPRASPSGRLY

SEQ ID NO: 165 - protein, 13 aa, Artificial Sequence
  Synthetic
LWPPRASPSGRPY

SEQ ID NO: 166 - protein, 13 aa, Artificial Sequence
  Synthetic
LWPPRASPSGRVY

SEQ ID NO: 167 - protein, 13 aa, Artificial Sequence
  Synthetic
LWPPRASPSGSIY

SEQ ID NO: 168 - protein, 13 aa, Artificial Sequence
  Synthetic
LWPPRASPSGTIY

SEQ ID NO: 169 - protein, 13 aa, Artificial Sequence
  Synthetic
LWPPRVSPGGGVY

SEQ ID NO: 170 - protein, 13 aa, Artificial Sequence
  Synthetic
LWPPRVSPGGRVY

SEQ ID NO: 171 - protein, 13 aa, Artificial Sequence
  Synthetic
LWPPRVSPSGRGY

SEQ ID NO: 172 - protein, 13 aa, Artificial Sequence
  Synthetic
LWPPRVSPSGRIY

SEQ ID NO: 173 - protein, 9 aa, Artificial Sequence
  Synthetic
LYPPASSGR

SEQ ID NO: 174 - protein, 9 aa, Artificial Sequence
  Synthetic
MYRPGTYDY

SEQ ID NO: 175 - protein, 9 aa, Artificial Sequence
  Synthetic
QWPPRALDA

SEQ ID NO: 176 - protein, 165 aa, Artificial Sequence
  Synthetic polymer.
CDLPQTHSLGSRRTLMLLAQMRKISLFSCLKDRHDFGFPQEEFGNQFQKAETIPVLHEMIQQIFNLFSTKDSSAAWDETLLDKFYTELYQQLNDLEACVIQGVGVTETPLMKEDSILAVRKYFQRITLYLKEKKYSPCAWEVVRAEIMRSFSLSTNLQESLRSKE

SEQ ID NO: 177 - protein, 165 aa, Artificial Sequence [sequence omitted]

SEQ ID NO: 178 - protein, 166 aa, Artificial Sequence
  Synthetic polymer.
MSYNLLGFLQRSSNFQCQKLLWQLNGRLEYCLKDRMNFDIPEEIKQLQQFQKEDAALTIYEMLQNIFAIFRQDSSSTGWNETIVENLLANVYHQINHLKTVLEEKLEKEDFTRGKLMSSLHLKRYYGRILHYLKAKEYSHCAWTIVRVEILRNFYFINRLTGYLRN

SEQ ID NO: 179 - protein, 166 aa, Artificial Sequence
  Synthetic polymer.
CDLPQTHSLGNRRALILLAQMRRISPFSCLKDRHDFGFPQEEFDGNQFQKAQAISVLHEMIQQTFNLFSTKDSSAAWDESLLEKFYTELYQQLNDLEACVIQEVGVEETPLMNVDSILAVKKYFQRITLYLTEKKYSPCAWEVVRAEIMRSFSLSTNLQERLRRKE

SEQ ID NO: 180 - protein, 165 aa, Artificial Sequence
  Synthetic polymer.
APMAEGGGQNHHEVVKFMDVYQRSYCHPIETLVDIFQEYPDEIEYIFKPSCVPLMRCGGCCNDEGLECVPTEESNITMQIMRIKPHQGQHIGEMSFLQHNKCECRPKKDRARQENPCGPCSERRKHLFVQDPQTCKCSCKNTDSRCKARQLELNERTCRCDKPRR

SEQ ID NO: 181 - protein, 165 aa, Artificial Sequence
  Synthetic polymer.
APMAEGGGQNHHEVVKFMDVYQRSYCHPIETLVDIFQEYPDEIEYIFKPSCVPLMRCGGCCNDEGLECVPTEESNITMQIMRIKPHQGQHIGEMSFLQHNKCECRPKKDRARQENPCGPCSERRKHLFVQDPQTCKCSCKNTDSRCKARQLELNERTCRSLTRKD

SEQ ID NO: 182 - protein, 156 aa, Artificial Sequence
  Synthetic polymer.
VRSSSRTPSDKPVAHWANPQAEGQLQWLNRRANALLANGVELRDNQLVVPSEGLYLIYSQVLFKGQGCPSTHVLLTHTISRIAVSYQTKVNLLSAIKSPCQRETPEGAEAKPWYEPIYLGGVFQLEKGDRLSAEINRPDYLDFAESGQVYFGIIAL

SEQ ID NO: 183 - protein, 170 aa, Artificial Sequence
  Synthetic polymer.
LPGVGLTPSAAQTARQHPKMHLAHSNLKPAAHLIGDPSKQNSLLWRANTDRAFLQDGFSLSNNSLLVPTSGIYFVYSQWFSGKAYSPKATSSPLYLAHEVQLFSSQYPFHVPLLSSQKMVYPGLQEPWLHSMYHGAAFQLTQGDQLSTHTDGIPHLVLSPSTVFFGAFAL

SEQ ID NO: 184 - protein, 281 aa, Artificial Sequence [sequence omitted]

SEQ ID NO: 185 - protein, 153 aa, Artificial Sequence
  Synthetic polymer.
APVRSLNCTLRDSQQKSLVMSGPYELKALHLQGQDMEQQVVFSMSFVQGEESNDKIPVALGLKEKNLYLSCVLKDDKPTLQLESVDPKNYPKKKMEKRFVFNKIELNNKLEFESAQFPNWYISTSQAENMPVFLGGTKGGQDITDFTMQFVSS

SEQ ID NO: 186 - protein, 133 aa, Artificial Sequence [sequence omitted]

SEQ ID NO: 187 - protein, 129 aa, Artificial Sequence [sequence omitted]

SEQ ID NO: 188 - protein, 185 aa, Artificial Sequence
  Synthetic polymer.
APVPPGEDSKDVAAPHRQPLTSSERIDKQIRYILDGISALRKETCNKSNMCESSKEALAENNLNLPKMAEKDGCFQSGFNEETCLVKIITGLLEFEVYLEYLQNRFESSEEQARAVQMSTKVLIQFLQKKAKNLDAITTPDPTTNASLTTKLQAQNQWLQDMTTHLILRSFKEFLQSSLRALRQM

SEQ ID NO: 189 - protein, 114 aa, Artificial Sequence
  Synthetic polymer.
SPGPVPPSTALRELIEELVNITQNQKAPLCNGSMVWSINLTAGMYCAALESLINVSGCSAIEKTQRMLSGFCPHKVSAGQFSSLHVRDTKIEVAQFVKDLLLHLKKLFREGRFN

SEQ ID NO: 190 - protein, 194 aa, Artificial Sequence
  Synthetic polymer.
MAAEPVEDNCINFVAMKFIDNTLYFIAEDDENLESDYFGKLESKLSVIRNLNDQVLFIDQGNRPLFEDMTDSDCRDNAPRTIFLISMYKDSQPRGMAVTISVKCEKISTLSCENKIISFKEMNPPDNIKDTKSDIIFFQRSVPGHDNKMQFESSSYEGYFLACEKERDLFKLILKKEDELGDRSIMFTVQNEDL

SEQ ID NO: 191 - protein, 270 aa, Artificial Sequence
  Synthetic polymer.
MKPKMKYSTNKISTAKWKNTASKALCFKLGKSQQKAKEVCPMYFMKLRSGLMIKKEACYFRRETTKRPSLKTGRKHKRHLVLAACQQQSTVECFAFGISGVQKYTRALHDSSITGISPITEYLASLSTYNDQSITFALEDESYEIYVEDLKKDEKKDKVLLSYYESQHPSNESGDGVDGKMLMVTLSPTKDFWLHANNKEHSVELHKCEKPLPDQAFFVLHNMHSNCVSFECKTDPGVFIGVKDNHLALIKVDSSENLCTENILFKLSET

SEQ ID NO: 192 - protein, 10 aa, Artificial Sequence
  Synthetic polymer.
GFTFDDYAMS

SEQ ID NO: 193 - protein, 10 aa, Artificial Sequence
  Synthetic polymer.
GFTFDDYAIG

SEQ ID NO: 194 - protein, 17 aa, Artificial Sequence
  Synthetic polymer.
TINWNGGSAEYAEPVKG

SEQ ID NO: 195 - protein, 17 aa, Artificial Sequence
  Synthetic polymer.
CIRVSDGSTYYADPVKG

SEQ ID NO: 196 - protein, 11 aa, Artificial Sequence
  Synthetic polymer.
KDADLVWYNLS

SEQ ID NO: 197 - protein, 11 aa, Artificial Sequence
  Synthetic polymer.
KDADLVWYNLR

SEQ ID NO: 198 - protein, 23 aa, Artificial Sequence
  Synthetic polymer.
AGSLYTCVQSIWVPARPYYDMDY

SEQ ID NO: 199 - protein, 132 aa, Artificial Sequence
  Synthetic polymer.
QVQLQESGGGSVQPGGSLRLSCAASGFTFDDYAMSWVRQVPGKGLEWVSTINWNGGSAEYAEPVKGRFTISRDNAKNTVYLQMNSLKLEDTAVYYCAKDADLVWYNLSTGQGTQVTVSSAAAYPYDVPDYGS

SEQ ID NO: 200 - protein, 132 aa, Artificial Sequence
  Synthetic polymer.
QVQLQESGGGLVQPGGSLRLSCAASGFTFDDYAMSWVRQVPGKGLEWVSTINWNGGSAEYAEPVKGRFTISRDNAKNTVYLQMNSLKLEDTAVYYCAKDADLVWYNLRTGQGTQVTVSSAAAYPYDVPDYGS

SEQ ID NO: 201 - protein, 145 aa, Artificial Sequence
  Synthetic polymer.
QVQLQESGGGLVQAGGSLRLSCAASGFTFDDYAIGWFRQAPGKEREGVSCIRVSDGSTYYADPVKGRFTISSDNAKNTVYLQMNSLKPEDAAVYYCAAGSLYTCVQSIVVVPARPYYDMDYWGKGTQVTVSSAAAYPYDVPDYGS

SEQ ID NO: 202 - protein, 10 aa, Artificial Sequence
  Synthetic polymer.
GRSFSSYTLA

SEQ ID NO: 203 - protein, 10 aa, Artificial Sequence
  Synthetic polymer.
GRTFSSYTMG

SEQ ID NO: 204 - protein, 10 aa, Artificial Sequence
  Synthetic polymer.
GRTFSSYIMG

SEQ ID NO: 205 - protein, 10 aa, Artificial Sequence
  Synthetic polymer.
GRTFSSYTMG

SEQ ID NO: 206 - protein, 14 aa, Artificial Sequence
  Synthetic polymer.
GRTSGRTFSSYTMG

SEQ ID NO: 207 - protein, 10 aa, Artificial Sequence
  Synthetic polymer.
GRTFSSYAMG

SEQ ID NO: 208 - protein, 10 aa, Artificial Sequence
  Synthetic polymer.
GLTFSNYIMG

SEQ ID NO: 209 - protein, 10 aa, Artificial Sequence
  Synthetic polymer.
GRTFSSYTMG

SEQ ID NO: 210 - protein, 10 aa, Artificial Sequence
  Synthetic polymer.
GRTFSSDTMG

SEQ ID NO: 211 - protein, 10 aa, Artificial Sequence
  Synthetic polymer.
GLTFSNYIMG

SEQ ID NO: 212 - protein, 10 aa, Artificial Sequence
  Synthetic polymer.
GFTLDYYGIG

SEQ ID NO: 213 - protein, 10 aa, Artificial Sequence
  Synthetic polymer.
GHTFSSYTMG

SEQ ID NO: 214 - protein, 10 aa, Artificial Sequence
  Synthetic polymer.
GRTFSSYVIG

SEQ ID NO: 215 - protein, 10 aa, Artificial Sequence
  Synthetic polymer.
GFAFDGYAIG

SEQ ID NO: 216 - protein, 10 aa, Artificial Sequence
  Synthetic polymer.
GFAFGFFDMT

SEQ ID NO: 217 - protein, 10 aa, Artificial Sequence
  Synthetic polymer.
GRTFSNYVIG

SEQ ID NO: 218 - protein, 10 aa, Artificial Sequence
  Synthetic polymer.
GSIFSINVMG

SEQ ID NO: 219 - protein, 10 aa, Artificial Sequence
  Synthetic polymer.
GRTFSNYNVG

SEQ ID NO: 220 - protein, 10 aa, Artificial Sequence
  Synthetic polymer.
GHTFSSYTMG

SEQ ID NO: 221 - protein, 10 aa, Artificial Sequence
  Synthetic polymer.
GRTFSTYPVG

SEQ ID NO: 222 - protein, 10 aa, Artificial Sequence
  Synthetic polymer.
GRTFSNYAMG

SEQ ID NO: 223 - protein, 10 aa, Artificial Sequence
  Synthetic polymer.
GRTFSDYRMG

SEQ ID NO: 224 - protein, 10 aa, Artificial Sequence
  Synthetic polymer.
GLTFSNYIMA

SEQ ID NO: 225 - protein, 10 aa, Artificial Sequence
  Synthetic polymer.
GRTFSNSVMG

SEQ ID NO: 226 - protein, 10 aa, Artificial Sequence
  Synthetic polymer.
GRTFSSYIIG

SEQ ID NO: 227 - protein, 10 aa, Artificial Sequence
  Synthetic polymer.
GRTFSSYVMG

SEQ ID NO: 228 - protein, 10 aa, Artificial Sequence
  Synthetic polymer.
GGTFSNYVMG

SEQ ID NO: 229 - protein, 10 aa, Artificial Sequence
  Synthetic polymer.
GRTFSNYGIG

SEQ ID NO: 230 - protein, 10 aa, Artificial Sequence
  Synthetic polymer.
GFTFDDYAIA

SEQ ID NO: 231 - protein, 10 aa, Artificial Sequence
  Synthetic polymer.
GRTFSSYTVA

SEQ ID NO: 232 - protein, 10 aa, Artificial Sequence
  Synthetic polymer.
GFPFDDYAIA

SEQ ID NO: 233 - protein, 10 aa, Artificial Sequence
  Synthetic polymer.
GRTFSSYVMG

SEQ ID NO: 234 - protein, 10 aa, Artificial Sequence
  Synthetic polymer.
GRTLSSNPMA

SEQ ID NO: 235 - protein, 10 aa, Artificial Sequence
  Synthetic polymer.
GFTFDNYAIG

SEQ ID NO: 236 - protein, 10 aa, Artificial Sequence
  Synthetic polymer.
GRAFSSYFMG

SEQ ID NO: 237 - protein, 10 aa, Artificial Sequence
  Synthetic polymer.
TPTFSSYNMG

SEQ ID NO: 238 - protein, 10 aa, Artificial Sequence
  Synthetic polymer.
GFTFDDYAIA

SEQ ID NO: 239 - protein, 10 aa, Artificial Sequence
  Synthetic polymer.
GGTFSGYIMG

SEQ ID NO: 240 - protein, 10 aa, Artificial Sequence
  Synthetic polymer.
GRSFSSYTIA

SEQ ID NO: 241 - protein, 10 aa, Artificial Sequence
  Synthetic polymer.
GFSSDDYTIG

SEQ ID NO: 242 - protein, 10 aa, Artificial Sequence
  Synthetic polymer.
GFTFDDYTIG

SEQ ID NO: 243 - protein, 10 aa, Artificial Sequence
  Synthetic polymer.
GFSSDDYTIG

SEQ ID NO: 244 - protein, 10 aa, Artificial Sequence
  Synthetic polymer.
GFTFDQYTIA

SEQ ID NO: 245 - protein, 10 aa, Artificial Sequence
  Synthetic polymer.
GRTFSSYAMA

SEQ ID NO: 246 - protein, 10 aa, Artificial Sequence
  Synthetic polymer.
GFAFDGYAIG

SEQ ID NO: 247 - protein, 10 aa, Artificial Sequence
  Synthetic polymer.
GFSSDDYTIA

SEQ ID NO: 248 - protein, 10 aa, Artificial Sequence
  Synthetic polymer.
GFSSDDYTIG

SEQ ID NO: 249 - protein, 10 aa, Artificial Sequence
  Synthetic polymer.
GFTFDDYTIG

SEQ ID NO: 250 - protein, 10 aa, Artificial Sequence
  Synthetic polymer.
GFSSDDYTIG

SEQ ID NO: 251 - protein, 10 aa, Artificial Sequence
  Synthetic polymer.
GFSSDDYTIG

SEQ ID NO: 252 - protein, 10 aa, Artificial Sequence
  Synthetic polymer.
GFSFDDYAIA

SEQ ID NO: 253 - protein, 10 aa, Artificial Sequence
  Synthetic polymer.
GFSSDDYTIG

SEQ ID NO: 254 - protein, 10 aa, Artificial Sequence
  Synthetic polymer.
GFTGNDLAIG

SEQ ID NO: 255 - protein, 10 aa, Artificial Sequence
  Synthetic polymer.
GFSSDDYTIA

SEQ ID NO: 256 - protein, 10 aa, Artificial Sequence
  Synthetic polymer.
EGTLSSYGIG

SEQ ID NO: 257 - protein, 10 aa, Artificial Sequence
  Synthetic polymer.
GFSSDDYTIA

SEQ ID NO: 258 - protein, 10 aa, Artificial Sequence
  Synthetic polymer.
GFTFDDYAIA

SEQ ID NO: 259 - protein, 10 aa, Artificial Sequence
  Synthetic polymer.
GLSSDDYTIG

SEQ ID NO: 260 - protein, 10 aa, Artificial Sequence
  Synthetic polymer.
GLSSDDYTIG

SEQ ID NO: 261 - protein, 10 aa, Artificial Sequence
  Synthetic polymer.
GFSSDDYTIG

SEQ ID NO: 262 - protein, 10 aa, Artificial Sequence
  Synthetic polymer.
GFSFDDYTIG

SEQ ID NO: 263 - protein, 10 aa, Artificial Sequence
  Synthetic polymer.
GFTFDDYAIA

SEQ ID NO: 264 - protein, 10 aa, Artificial Sequence
  Synthetic polymer.
GFTFDDYAIG

SEQ ID NO: 265 - protein, 10 aa, Artificial Sequence
  Synthetic polymer.
GFTFGDYTIG

SEQ ID NO: 266 - protein, 10 aa, Artificial Sequence
  Synthetic polymer.
EGTFSSYGIG

SEQ ID NO: 267 - protein, 10 aa, Artificial Sequence
  Synthetic polymer.
GFSSDDYTIG

SEQ ID NO: 268 - protein, 10 aa, Artificial Sequence
  Synthetic polymer.
GVSIGDYNIG

SEQ ID NO: 269 - protein, 10 aa, Artificial Sequence
  Synthetic polymer.
GFTFDDYTIA

SEQ ID NO: 270 - protein, 10 aa, Artificial Sequence
  Synthetic polymer.
GFTFDDYTIA

SEQ ID NO: 271 - protein, 11 aa, Artificial Sequence
  Synthetic polymer.
ASITWGGGNTY

SEQ ID NO: 272 - protein, 11 aa, Artificial Sequence
  Synthetic polymer.
AATVWTGAGTV

SEQ ID NO: 273 - protein, 11 aa, Artificial Sequence
  Synthetic polymer.
AAIGWSADITV

SEQ ID NO: 274 - protein, 11 aa, Artificial Sequence
  Synthetic polymer.
AFIDWSGGGTY

SEQ ID NO: 275 - protein, 11 aa, Artificial Sequence
  Synthetic polymer.
ATITWGGGSTY

SEQ ID NO: 276 - protein, 11 aa, Artificial Sequence
  Synthetic polymer.
AAISWSGGPTV

SEQ ID NO: 277 - protein, 11 aa, Artificial Sequence
  Synthetic polymer.
AAITWGGGSTV

SEQ ID NO: 278 - protein, 11 aa, Artificial Sequence
  Synthetic polymer.
AAITWSGVSTV

SEQ ID NO: 279 - protein, 11 aa, Artificial Sequence
  Synthetic polymer.
GAIMWSGAFTH

SEQ ID NO: 280 - protein, 11 aa, Artificial Sequence
  Synthetic polymer.
AAITWGGGSTV

SEQ ID NO: 281 - protein, 11 aa, Artificial Sequence
  Synthetic polymer.
SCISSSDRNTY

SEQ ID NO: 282 - protein, 11 aa, Artificial Sequence
  Synthetic polymer.
AFIDWSGGGTY

SEQ ID NO: 283 - protein, 11 aa, Artificial Sequence
  Synthetic polymer.
AVITWSGDSTY

SEQ ID NO: 284 - protein, 11 aa, Artificial Sequence
  Synthetic polymer.
ACISSKDGSTY

SEQ ID NO: 285 - protein, 11 aa, Artificial Sequence
  Synthetic polymer.
SGINSIGGSTT

SEQ ID NO: 286 - protein, 10 aa, Artificial Sequence
  Synthetic polymer.
AWTWSGDSTY

SEQ ID NO: 287 - protein, 10 aa, Artificial Sequence
  Synthetic polymer.
AKITNFGITS

SEQ ID NO: 288 - protein, 11 aa, Artificial Sequence
  Synthetic polymer.
SFISWISDITY

SEQ ID NO: 289 - protein, 11 aa, Artificial Sequence
  Synthetic polymer.
AFIDWSGGGTY

SEQ ID NO: 290 - protein, 11 aa, Artificial Sequence
  Synthetic polymer.
AVILWSGVSTY

SEQ ID NO: 291 - protein, 11 aa, Artificial Sequence
  Synthetic polymer.
AAIVWSGGSTY

SEQ ID NO: 292 - protein, 11 aa, Artificial Sequence
  Synthetic polymer.
AAISSSGYHTY

SEQ ID NO: 293 - protein, 11 aa, Artificial Sequence
  Synthetic polymer.
SCISSPDGSTY

SEQ ID NO: 294 - protein, 11 aa, Artificial Sequence
  Synthetic polymer.
AAVLWSGVSTA

SEQ ID NO: 295 - protein, 11 aa, Artificial Sequence
  Synthetic polymer.
VAITWDGSATT

SEQ ID NO: 296 - protein, 11 aa, Artificial Sequence
  Synthetic polymer.
AAIGWNGGITY

SEQ ID NO: 297 - protein, 11 aa, Artificial Sequence
  Synthetic polymer.
GFITWSGASTY

SEQ ID NO: 298 - protein, 11 aa, Artificial Sequence
  Synthetic polymer.
AGINWSGESAD

SEQ ID NO: 299 - protein, 11 aa, Artificial Sequence
  Synthetic polymer.
SCIERSDGSTY

SEQ ID NO: 300 - protein, 11 aa, Artificial Sequence
  Synthetic polymer.
SCISNTDSSTY

SEQ ID NO: 301 - protein, 11 aa, Artificial Sequence
  Synthetic polymer.
SCISNTDSSTY

SEQ ID NO: 302 - protein, 11 aa, Artificial Sequence
  Synthetic polymer.
AQISWSAGSIY

SEQ ID NO: 303 - protein, 11 aa, Artificial Sequence
  Synthetic polymer.
AGMSWNPGPAV

SEQ ID NO: 304 - protein, 11 aa, Artificial Sequence
  Synthetic polymer.
SCISRSDGSTY

SEQ ID NO: 305 - protein, 11 aa, Artificial Sequence
  Synthetic polymer.
ANIGWTGDMTY

SEQ ID NO: 306 - protein, 11 aa, Artificial Sequence
  Synthetic polymer.
AAIIWSGSMTY

SEQ ID NO: 307 - protein, 11 aa, Artificial Sequence
  Synthetic polymer.
SCISNTDSSTY

SEQ ID NO: 308 - protein, 11 aa, Artificial Sequence
  Synthetic polymer.
AANTWSGGPTY

SEQ ID NO: 309 - protein, 10 aa, Artificial Sequence
  Synthetic polymer.
SCISSDGSTG

SEQ ID NO: 310 - protein, 11 aa, Artificial Sequence
  Synthetic polymer.
SCYSSSDGSTG

SEQ ID NO: 311 - protein, 10 aa, Artificial Sequence
  Synthetic polymer.
SCISSDGSTG

SEQ ID NO: 312 - protein, 11 aa, Artificial Sequence
  Synthetic polymer.
GCIKSSDGTTG

SEQ ID NO: 313 - protein, 11 aa, Artificial Sequence
  Synthetic polymer.
SCISNTDSSTY

SEQ ID NO: 314 - protein, 11 aa, Artificial Sequence
  Synthetic polymer.
AAIAWSAGSTY

SEQ ID NO: 315 - protein, 11 aa, Artificial Sequence
  Synthetic polymer.
SCISSKEGSTY

SEQ ID NO: 316 - protein, 11 aa, Artificial Sequence
  Synthetic polymer.
SCISSSDGSTG

SEQ ID NO: 317 - protein, 11 aa, Artificial Sequence
  Synthetic polymer.
SCYSSRDGTTG

SEQ ID NO: 318 - protein, 10 aa, Artificial Sequence
  Synthetic polymer.
SCISSDGSTG

SEQ ID NO: 319 - protein, 11 aa, Artificial Sequence
  Synthetic polymer.
SCYSSSDGSTG

SEQ ID NO: 320 - protein, 11 aa, Artificial Sequence
  Synthetic polymer.
SCFSSSDGSTG

SEQ ID NO: 321 - protein, 11 aa, Artificial Sequence
  Synthetic polymer.
SCISNTDSSTF

SEQ ID NO: 322 - protein, 11 aa, Artificial Sequence
  Synthetic polymer.
SCYSSSDGSTG

SEQ ID NO: 323 - protein, 11 aa, Artificial Sequence
  Synthetic polymer.
SCISNTDSSTY

SEQ ID NO: 324 - protein, 11 aa, Artificial Sequence
  Synthetic polymer.
SCISSSDGSTG

SEQ ID NO: 325 - protein, 11 aa, Artificial Sequence
  Synthetic polymer.
GGINWSGDSTD

SEQ ID NO: 326 - protein, 11 aa, Artificial Sequence
  Synthetic polymer.
SCFSSSDGSAG

SEQ ID NO: 327 - protein, 11 aa, Artificial Sequence
  Synthetic polymer.
SCISNTDSSTY

SEQ ID NO: 328 - protein, 11 aa, Artificial Sequence
  Synthetic polymer.
SCFSTRDGNAG

SEQ ID NO: 329 - protein, 11 aa, Artificial Sequence
  Synthetic polymer.
SCFSSRDGSTG

SEQ ID NO: 330 - protein, 11 aa, Artificial Sequence
  Synthetic polymer.
SCFSSRDGSTG

SEQ ID NO: 331 - protein, 10 aa, Artificial Sequence
  Synthetic polymer.
SCISSDGSTG

SEQ ID NO: 332 - protein, 11 aa, Artificial Sequence
  Synthetic polymer.
SCISNTDSSTY

SEQ ID NO: 333 - protein, 11 aa, Artificial Sequence
  Synthetic polymer.
SCISSPDGSTY

SEQ ID NO: 334 - protein, 11 aa, Artificial Sequence
  Synthetic polymer.
SCYSSSDGNTG

SEQ ID NO: 335 - protein, 11 aa, Artificial Sequence
  Synthetic polymer.
GGINWSGDSTD

SEQ ID NO: 336 - protein, 11 aa, Artificial Sequence
  Synthetic polymer.
SCFSSSDGSTG

SEQ ID NO: 337 - protein, 11 aa, Artificial Sequence
  Synthetic polymer.
SCISSGDGTTY

SEQ ID NO: 338 - protein, 10 aa, Artificial Sequence
  Synthetic polymer.
SCISSDGSTG

SEQ ID NO: 339 - protein, 10 aa, Artificial Sequence
  Synthetic polymer.
SCISSDGSTG

SEQ ID NO: 340 - protein, 19 aa, Artificial Sequence
  Synthetic polymer.
AKGLRNSDWDLRRGYEYDY

SEQ ID NO: 341 - protein, 25 aa, Artificial Sequence
  Synthetic polymer.
ADQASVPPPYGSERYDIASPSEYDY

SEQ ID NO: 342 - protein, 21 aa, Artificial Sequence
  Synthetic polymer.
ANSRAYYSSSYDLGRLASYDY

SEQ ID NO: 343 - protein, 16 aa, Artificial Sequence
  Synthetic polymer.
AAQRLGSVTDYTKYDY

SEQ ID NO: 344 - protein, 20 aa, Artificial Sequence
  Synthetic polymer.
ASVKWAGSGIDISGSRNYDY

SEQ ID NO: 345 - protein, 21 aa, Artificial Sequence
  Synthetic polymer.
AKRLDYSATDKGVDLSDEYDY

SEQ ID NO: 346 - protein, 19 aa, Artificial Sequence
  Synthetic polymer.
AAGGSGRLRDLKVGQNYDY

SEQ ID NO: 347 - protein, 23 aa, Artificial Sequence
  Synthetic polymer.
ADSPPRTYSSGSVNLEDGSEYDY

SEQ ID NO: 348 - protein, 21 aa, Artificial Sequence
  Synthetic polymer.
VIPGRGSALPIDVGKSDEYEY

SEQ ID NO: 349 - protein, 19 aa, Artificial Sequence
  Synthetic polymer.
AAGASGRLRDLKVGQNYDY

SEQ ID NO: 350 - protein, 23 aa, Artificial Sequence
  Synthetic polymer.
ADGNVWSPPICGSAGPPPGGMDY

SEQ ID NO: 351 - protein, 16 aa, Artificial Sequence
  Synthetic polymer.
AAQRLGSVTDYTKYDY

SEQ ID NO: 352 - protein, 22 aa, Artificial Sequence
  Synthetic polymer.
AIPPRAYSGGSYSLKDQSKYEY

SEQ ID NO: 353 - protein, 23 aa, Artificial Sequence
  Synthetic polymer.
ADGNVWSPPICSSAGPPPGGMDY

SEQ ID NO: 354 - protein, 9 aa, Artificial Sequence
  Synthetic polymer.
KSRSSYSNN

SEQ ID NO: 355 - protein, 22 aa, Artificial Sequence
  Synthetic polymer.
AMPPRAYTGRSVSLKDQSKYEY

SEQ ID NO: 356 - protein, 13 aa, Artificial Sequence
  Synthetic polymer.
LDTTGWGPPPYQY

SEQ ID NO: 357 - protein, 22 aa, Artificial Sequence
  Synthetic polymer.
AHPPDPSRGGEWRLQTPSEYDY

SEQ ID NO: 358 - protein, 16 aa, Artificial Sequence
  Synthetic polymer.
AAQRLGSVTDYTKYDY

SEQ ID NO: 359 - protein, 24 aa, Artificial Sequence
  Synthetic polymer.
VPRSHFTTAQDMGQDMGAPSWYEY

SEQ ID NO: 360 - protein, 22 aa, Artificial Sequence
  Synthetic polymer.
AVLIRYYSGGYQGLSDANEYDY

SEQ ID NO: 361 - protein, 16 aa, Artificial Sequence
  Synthetic polymer.
WKYLSGSYSYAGQYNF

SEQ ID NO: 362 - protein, 23 aa, Artificial Sequence
  Synthetic polymer.
ADFNVWSPPICGSVGPPPGGMDY

SEQ ID NO: 363 - protein, 21 aa, Artificial Sequence
  Synthetic polymer.
AHESTYYSGTYYLTDPRRYVY

SEQ ID NO: 364 - protein, 19 aa, Artificial Sequence
  Synthetic polymer.
AVPARGLTMDLENSDIYDH

SEQ ID NO: 365 - protein, 22 aa, Artificial Sequence
  Synthetic polymer.
AATLQVTGSYYLDLSTVDIYDN

SEQ ID NO: 366 - protein, 20 aa, Artificial Sequence
  Synthetic polymer.
ATLFRSNGPKDLSSGYEYDY

SEQ ID NO: 367 - protein, 13 aa, Artificial Sequence
  Synthetic polymer.
AGESGVWVGGLDY

SEQ ID NO: 368 - protein, 22 aa, Artificial Sequence
  Synthetic polymer.
VGSANSGEFRFGWVLKPDLYNY

SEQ ID NO: 369 - protein, 23 aa, Artificial Sequence
  Synthetic polymer.
ADGNVWSPPICGSAGPPPGGMDY

SEQ ID NO: 370 - protein, 23 aa, Artificial Sequence
  Synthetic polymer.
ADGNVWSPPICGSAGPPPGGMDY

SEQ ID NO: 371 - protein, 20 aa, Artificial Sequence
  Synthetic polymer.
ERGYAYCSDDGCQRTQDYDY

SEQ ID NO: 372 - protein, 21 aa, Artificial Sequence
  Synthetic polymer.
GAARAWWSGSYDYTRMNNYDY

SEQ ID NO: 373 - protein, 23 aa, Artificial Sequence
  Synthetic polymer.
AETSADSGEFRFGWVLKPSLYDY

SEQ ID NO: 374 - protein, 21 aa, Artificial Sequence
  Synthetic polymer.
AAGSAYSGSYWNITMAANYDY

SEQ ID NO: 375 - protein, 18 aa, Artificial Sequence
  Synthetic polymer.
AQRIFGAQPMDLSGDYEY

SEQ ID NO: 376 - protein, 23 aa, Artificial Sequence
  Synthetic polymer.
ADGNVWSPPICGSAGPPPGGMDY

SEQ ID NO: 377 - protein, 18 aa, Artificial Sequence
  Synthetic polymer.
ARDYRGIKDLDLKGDYDY

SEQ ID NO: 378 - protein, 25 aa, Artificial Sequence
  Synthetic polymer.
ADFNVWSPPICGSIWYGPPPRGMDY

SEQ ID NO: 379 - protein, 25 aa, Artificial Sequence
  Synthetic polymer.
ADSNVWSPPICGSRWYGPPPGGMAY

SEQ ID NO: 380 - protein, 25 aa, Artificial Sequence
  Synthetic polymer.
ADFNVWSPPICGSNWYGPPPGGMDY

SEQ ID NO: 381 - protein, 25 aa, Artificial Sequence
  Synthetic polymer.
ADFNVWSPPICGSIWYGPPPGGMDY

SEQ ID NO: 382 - protein, 23 aa, Artificial Sequence
  Synthetic polymer.
ADGNVWSPPICGSAGPPPGGMDY

SEQ ID NO: 383 - protein, 17 aa, Artificial Sequence
  Synthetic polymer.
ARIITVATMRLDSDYDY

SEQ ID NO: 384 - protein, 23 aa, Artificial Sequence
  Synthetic polymer.
ADGNVWSPPICGSAGPPPGGMDY

SEQ ID NO: 385 - protein, 25 aa, Artificial Sequence
  Synthetic polymer.
ADSNVWSPPICGRTWYGPPPGGMDY

SEQ ID NO: 386 - protein, 25 aa, Artificial Sequence
  Synthetic polymer.
ADFNVWSPPICGSIWYGPPPGGMAY

SEQ ID NO: 387 - protein, 25 aa, Artificial Sequence
  Synthetic polymer.
ADFNVWSPPICGSNWYGPPPGGMDY

SEQ ID NO: 388 - protein, 25 aa, Artificial Sequence
  Synthetic polymer.
ADFNVWSPPICGSSWYGPPPGGMDY

SEQ ID NO: 389 - protein, 25 aa, Artificial Sequence
  Synthetic polymer.
ADFNVWSPPICGSRWYGPPPGGMEY

SEQ ID NO: 390 - protein, 23 aa, Artificial Sequence
  Synthetic polymer.
ADGNVWSPPICGSAGPPPGGMDY

SEQ ID NO: 391 - protein, 25 aa, Artificial Sequence
  Synthetic polymer.
ADFNVWSPPICGSRWYGPPPGGMAY

SEQ ID NO: 392 - protein, 23 aa, Artificial Sequence
  Synthetic polymer.
ADGNVWSPPICGSAGPPPGGMDY

SEQ ID NO: 393 - protein, 25 aa, Artificial Sequence
  Synthetic polymer.
ADSNVWSPPICGKTWYGPPPGGMDY

SEQ ID NO: 394 - protein, 13 aa, Artificial Sequence
  Synthetic polymer.
AGESGVWVGGLDY

SEQ ID NO: 395 - protein, 25 aa, Artificial Sequence
  Synthetic polymer.
ADSNVWSPPICGSTWYGPPPGGMAY

SEQ ID NO: 396 - protein, 23 aa, Artificial Sequence
  Synthetic polymer.
ADGNVWSPPICGSAGPPPGGMDY

SEQ ID NO: 397 - protein, 25 aa, Artificial Sequence
  Synthetic polymer.
ADFNVWSPPICGSRWYGPPPGGMDY

SEQ ID NO: 398 - protein, 25 aa, Artificial Sequence
  Synthetic polymer.
ADFNVWSPPICGSRWYGPPPGGMDY

SEQ ID NO: 399 - protein, 25 aa, Artificial Sequence
  Synthetic polymer.
ADFNVWSPPICGSRWYGPPPGGMDY

SEQ ID NO: 400 - protein, 25 aa, Artificial Sequence
  Synthetic polymer.
ADFNVWSPPICGSIWYGPPPGGMDY

SEQ ID NO: 401 - protein, 23 aa, Artificial Sequence
  Synthetic polymer.
ADGNVWSPPICGSAGPPPGGMDY

SEQ ID NO: 402 - protein, 23 aa, Artificial Sequence
  Synthetic polymer.
ADFNVWSPPICGSVGPPPGGMDY

SEQ ID NO: 403 - protein, 25 aa, Artificial Sequence
  Synthetic polymer.
ADFNVWSPPICGSSWYGPPPGGMAY

SEQ ID NO: 404 - protein, 13 aa, Artificial Sequence
  Synthetic polymer.
AGESGVWVGGLDY

SEQ ID NO: 405 - protein, 25 aa, Artificial Sequence
  Synthetic polymer.
ADFNVWSPPICGSSWYGPPPGGMEY

SEQ ID NO: 406 - protein, 23 aa, Artificial Sequence
  Synthetic polymer.
ADGNVWSPPICGSAGPPPGGMDY

SEQ ID NO: 407 - protein, 25 aa, Artificial Sequence
  Synthetic polymer.
ADFNVWSPPICSSNWYGPPPRGMDY

SEQ ID NO: 408 - protein, 25 aa, Artificial Sequence
  Synthetic polymer.
ADFNVWSPPICGSIWYGPPPRGMDY

SEQ ID NO: 409 - protein, 146 aa, Artificial Sequence
  Synthetic polymer.
QVQLQESGGGLVQAGGSLRLSCAASGRSFSSYTLAWFRQAPGKEREFVASITWGGGNTYYPDSVKGRFTISRDDAKNTVYLQMNSLKPEDTAVYYCAAKGLRNSDWDLRRGYEYDYWGQGTQVTVSSAAAYPYDVPDYGSHHHHHH

SEQ ID NO: 410 - protein, 152 aa, Artificial Sequence
  Synthetic polymer.
QVQLQESGGGLVQDGGSLRLSCAFSGRTFSSYTMGWFRQGPGKEREFVAATVWTGAGTVYADSVKGRFTISRDNAKNTVYLQMNSLRPEDTAVYYCAADQASVPPPYGSERYDIASPSEYDYWGQGTQVTVSSAAAYPYDVPDYGSHHHHHH

SEQ ID NO: 411 - protein, 148 aa, Artificial Sequence
  Synthetic polymer.
QVQLQESGGGLVQAGASLRLSCAASGRTFSSYIMGWFRQAPGKEREFVAAIGWSADITVYADSVKGRFTISRDNAENMVYLQMNSLNPEDTAVYYCAANSRAYYSSSYDLGRLASYDYWGQGTQVTVSSAAAYPYDVPDYGSHHHHHH

SEQ ID NO: 412 - protein, 143 aa, Artificial Sequence
  Synthetic polymer.
QVQLQESGGGLVQAGGSLRLSCAASGRTFSSYTMGWFRQAPGKEREFVAFIDWSGGGTYYDDSVKGRFTISRDNAENTVYLQMNNLEPEDTAVYYCAAAQRLGSVTDYTKYDYWGQGTQVTVSSAAAYPYDVPDYGSHHHHHH

SEQ ID NO: 413 - protein, 152 aa, Artificial Sequence
  Synthetic polymer.
QVQLQESGGGLVQAGGSLRLSCAASGRTSGRTFSSYTMGWFRQAPGKEREFVATITWGGGSTYYADSVKGRFTISRDNANNTVYLQMNSLKPEDTAVYYCAASVKVVAGSGIDISGSRNYDYWGQGTQVTVSSAAAYPYDVPDYGSHHHHHH

SEQ ID NO: 414 - protein, 148 aa, Artificial Sequence
  Synthetic polymer.
QVQLQESGGGLVQPGGSLRLSCLASGRTFSSYAMGWFRQAPGKEREFVAAISWSGGPTVYADHVKGRFTISRDNAKNTVYLQVNSLKPEDTADYYCAAKRLDYSATDKGVDLSDEYDYWGQGTQVTVSSAAAYPYDVPDYGSHHHHHH

SEQ ID NO: 415 - protein, 146 aa, Artificial Sequence
  Synthetic polymer.
QVQLQESGGGLVQAGDSLRLSCAASGLTFSNYIMGWFRQAPGKEREFVAAITWGGGSTVYADSVEGRFTISRDGTKNTVSLQMNSLLPEDTAVYYCAAAGGSGRLRDLKVGQNYDYWGQGTQVTVSSAAAYPYDVPDYGSHHHHHH

SEQ ID NO: 416 - protein, 150 aa, Artificial Sequence
  Synthetic polymer.
QVQLQESGGGLVQAGGSLRLSCAASGRTFSSYTMGWFRQAPGREREFVAAITWSGVSTVYTDSVKGRFTVSRDNAKNTVYLQMNSLKPEDTAVYYCAADSPPRTYSSGSVNLEDGSEYDYWGQGTQVTVSSAAAYPYDVPDYGSHHHHHH

SEQ ID NO: 417 - protein, 148 aa, Artificial Sequence
  Synthetic polymer.
QVQLQESGGGLVQAGGSLRLSCAASGRTFSSDTMGWFRQAPGKEREFVGAIMWSGAFTHYADSVKGRFTISRDNAKNTVYLQMNALKPEDTAVYYCAVIPGRGSALPIDVGKSDEYEYWGQGTQVTVSSAAAYPYDVPDYGSHHHHHH

SEQ ID NO: 418 - protein, 146 aa, Artificial Sequence
  Synthetic polymer.
QVQLQESGGGLVQAGDSLRLSCAASGLTFSNYIMGWFRQAPGKEREFVAAITWGGGSTVYADSVEGRFTISRDGTKNTVSLQMNSLQPEDTAVYYCAAAGASGRLRDLKVGQNYDYWGQGTQVTVSSAAAYPYDVPDYGSHHHHHH

SEQ ID NO: 419 - protein, 150 aa, Artificial Sequence
  Synthetic polymer.
QVQLQESGGGLVQAGGSLRLSCAGSGFTLDYYGIGWFRQAPGKEREGVSCISSSDRNTYYADSVKGRFTISGDNAKNTVYLQMNNLKPEDTAVYYCAADGNVWSPPICGSAGPPPGGMDYWGKGTQVTVSSAAAYPYDVPDYGSHHHHHH

SEQ ID NO: 420 - protein, 143 aa, Artificial Sequence
  Synthetic polymer.
QVQLQESGGGLVQAGGSLRLSCVASGHTFSSYTMGWFRQAPGKEREFVAFIDWSGGGTYYANSVKGRFTISRDNAENTVYLQMNNLKPEDTAVYYCAAAQRLGSVTDYTKYDYWGQGTQVTVSSAAAYPYDVPDYGSHHHHHH

SEQ ID NO: 421 - protein, 149 aa, Artificial Sequence
  Synthetic polymer.
QVQLQESGGGLVQAGGSLRLSCAASGRTFSSYVIGWFRQAPGKEREFVAVITWSGDSTYSSDSLKGRFTISRDNAKNTVYLQMNALNPEDTAVYYCAAIPPRAYSGGSYSLKDQSKYEYWGQGTQVTVSSAAAYPYDVPDYGSHHHHHH

SEQ ID NO: 422 - protein, 149 aa, Artificial Sequence
  Synthetic polymer.
QVQLQESGGGLVQAEGSLKLSCISGFAFDGYAIGWFRQAPGKEREGVACISSKDGSTYYADSVKGRFTMSVDKTKNTVYLQMSSLKPEDTAVYYCAADGNVWSPPICSSAGPPPGGMDYWGKGTQVTVSSAAAYPYDVPDYGSHHHHHH

SEQ ID NO: 423 - protein, 139 aa, Artificial Sequence
  Synthetic polymer.
QVQLQESGGGLVQPGGSLTLSCAASGFAFGFFDMTWVRQAPGKGLEWVSGINSIGGSTTYADSVKGRFTISRDNAKNELYLQMNSLKPDDTAVYYCAKSRSSYSNNWRPPGQGTQVTVSSAAAYPYDVPDYGSHHHHHH

SEQ ID NO: 424 - protein, 149 aa, Artificial Sequence
  Synthetic polymer.
QVQLQESGGGLVQARGSLTLSCAASGRTFSNYVIGWFRQAPGEEREFVAVVTWSGDSTYSSDSLKGRFTISRDNAKNTVYLQMNNLNPEDTAVYYCAAMPPRAYTGRSVSLKDQSKYEYWGQGTQVTVSSAAAYPYDVPDYGSHHHHHH

SEQ ID NO: 425 - protein, 139 aa, Artificial Sequence
  Synthetic polymer.
QVQLQESGGGLVQPGGSLRLSCAASGSIFSINVMGWYRQTPGKERELVAKITNFGITSYADSAQGRFTISRGNAKNTVYLQMNSLKPEDTAVYYCNLDTTGWGPPPYQYWGQGTQVTVSSAAAYPYDVPDYGSHHHHHH

SEQ ID NO: 426 - protein, 149 aa, Artificial Sequence
  Synthetic polymer.
QVQLQESGGGLVQAGASLRLSCAASGRTFSNYNVGWFRQAPGKEREFVSFISWISDITYYSDSVKGRFIISRDNAKNMVYLQMNSLKPEDTAVYYCAAHPPDPSRGGEWRLQTPSEYDYWGQGTQVTVSSAAAYPYDVPDYGSHHHHHH

SEQ ID NO: 427 - protein, 143 aa, Artificial Sequence
  Synthetic polymer.
QVQLQESGGGLVQAGGSLRLSCAASGHTFSSYTMGWFRQAPGKEREFVAFIDWSGGGTYYADSVKGRFTISRDNAENTVYLQMNNLKPEDTAVYYCAAAQRLGSVTDYTKYDYWGQGTQVTVSSAAAYPYDVPDYGSHHHHHH

SEQ ID NO: 428 - protein, 151 aa, Artificial Sequence
  Synthetic polymer.
QVQLQESGGGLVQAGGSLRLSCAASGRTFSTYPVGWFRQAPGKEREFVAVILWSGVSTYYADSVKGRFTISRDNAQNTVYLQMDSLKPEDTAVYYCAVPRSHFTTAQDMGQDMGAPSWYEYWGQGTQVTVSSAAAYPYDVPDYGSHHHHHH

SEQ ID NO: 429 - protein, 149 aa, Artificial Sequence
  Synthetic polymer.
QVQLQESGGGLVQAGGSLRLSCAASGRTFSNYAMGWFRQAPGKEREFVAAIVWSGGSTYYADSVKGRFTISRDNAKNTVYLQMNSLKPEDTAVYYCAAVLIRYYSGGYQGLSDANEYDYWGQGTQVTVSSAAAYPYDVPDYGSHHHHHH

SEQ ID NO: 430 - protein, 145 aa, Artificial Sequence
  Synthetic polymer.
QVQLQESGGGLVQAGASLRLSCSASGRTFSDYRMGWFRQAPGKEREIWVAAISSSGYHTYYADSVKGRFTISRDNAKNTGYLQMSSLKPEDTAVYYCAVVKYLSGSYSYAGQYNFWGQGTQVTVSSAAAYPYDVPDYGSHHHHHH

SEQ ID NO: 431 - protein, 150 aa, Artificial Sequence
  Synthetic polymer.
QVQLQESGGGLVQAGDSLKLSCAASGLTFSNYIMAWFRQAPGKEREGVSCISSPDGSTYYADSVKGRFTISSDNAKNTVYLQMNSLKPEDTAVYYCAADFNVWSPPICGSVGPPPGGMDYWGKGTQVTVSSAAAYPYDVPDYGSHHHHHH

SEQ ID NO: 432 - protein, 148 aa, Artificial Sequence
  Synthetic polymer.
QVQLQESGGGLVQAGGSLRLSCAASGRTFSNSVMGWFRQPPGKEREFVAAVLWSGVSTAYADSVKGRFTISRDNAKNTVYLQMNNLKPDDTAVYYCAAHESTYYSGTYYLTDPRRYVYWGQGTQVTVSSAAAYPYDVPDYGSHHHHHH

SEQ ID NO: 433 - protein, 146 aa, Artificial Sequence
  Synthetic polymer.
QVQLQESGGGLVQAGGSLRLSCVGDGRTFSSYLIGWFRQAPGNEREFVVAITWDGSATTYADSVKGRFTVSRDSAKNTAYLQMNSLKPEDTAVYYCAAVPARGLTMDLENSDIYDHWGRGTQVTVSSAAAYPYDVPDYGSHHHHHH

SEQ ID NO: 434 - protein, 149 aa, Artificial Sequence
  Synthetic polymer.
QVQLQESGGGLVQAGGSLRLSCAASGRTFSSYVMGWFRQALGKEREFVAAIGWNGGITYYADSVKGRFAISRDNAKNTVYLQMNSLKPEDTAVYYCAAATLQVTGSYYLDLSTVDIYDNWGQGTQVTVSSAAAYPYDVPDYGSHHHHHH

SEQ ID NO: 435 - protein, 147 aa, Artificial Sequence
  Synthetic polymer.
QVQLQESGGGLVQAGGSLRLSCAASGGTFSNYVMGWFRQAPGKEREFVGFITWSGASTYYADSVKGRFTISRDNAENTVYLQMNSLKPEDTAVYYCAATLFRSNGPKDLSSGYEYDYWGQGTQVTVSSAAAYPYDVPDYGSHHHHHH

SEQ ID NO: 436 - protein, 140 aa, Artificial Sequence
  Synthetic polymer.
  misc_feature (112)..(112): Xaa can be any naturally occurring amino acid
QVQLQESGGGLVQAGDSLRLTCTASGRTFSNYGIGWFRQAPGKEREFVAGINWSGESADYADSVKGRFTISRDNAKNTVYLQMNSLKPEDTAVYYCAAGESGVWVGGLDYWXQGTQVTVSSAAAYPYDVPDYGSHHHHHH

SEQ ID NO: 437 - protein, 149 aa, Artificial Sequence
  Synthetic polymer.
QVQLQESGGGLVQAGGSLRLSCAASGFTFDDYAIAWFRQAPGKEREGVSCIERSDGSTYYADSVKGRFTISSDNAKNTVYLQMNSLKPEDTAVYYCAVGSANSGEFRFGWVLKPDLYNYWGQGTQVTVSSAAAYPYDVPDYGSHHHHHH

SEQ ID NO: 438 - protein, 150 aa, Artificial Sequence
  Synthetic polymer.
QVQLQESGGGLVQAGGSLRLSCTASGRTFSSYTVAWFRQSPGKEREGISCISNTDSSTYYADSVKGRFTISSDNAKSTVHLQMSSLKPEDTAVYYCAADGNVWSPPICGSAGPPPGGMDYWGKGTQVTVSSAAAYPYDVPDYGSHHHHHH

SEQ ID NO: 439 - protein, 150 aa, Artificial Sequence
  Synthetic polymer.
QVQLQESGGGLVQPGGSLRLSCATFGFPFDDYAIAWFRQAPGKEREGVSCISNTDSSTYYADSVKGRFTISSDNAKNTVHLQMSSLKPEDTAVYYCAADGNVWSPPICGSAGPPPGGMDYWGKGTQVTVSSAAAYPYDVPDYGSHHHHHH

SEQ ID NO: 440 - protein, 147 aa, Artificial Sequence
  Synthetic polymer.
QVQLQESGGGLVQAGGSLRLSCAASGRTFSSYVMGWFRQAPGKEREFVAQISWSAGSIYYADSVKGRFTISNDNAKRTVYLQMNSLKPEDTAVYYCAERGYAYCSDDGCQRTQDYDYWGQGTQVTVSSAAAYPYDVPDYGSHHHHHH

SEQ ID NO: 441 - protein, 148 aa, Artificial Sequence
  Synthetic polymer.
QVQLQESGGGLVQAGGSLRLSCAASGRTLSSNPMAWFRQAAGKEREFVAGMSWNPGPAVYADSVKGRFTISRDSAENTVYLQMNSLKPEDTAVYYCAGAARAWWSGSYDYTRMNNYDYWGPGTQVTVSSAAAYPYDVPDYGSHHHHHH

SEQ ID NO: 442 - protein, 150 aa, Artificial Sequence
  Synthetic polymer.
QVQLQESGGGLVQAGGSLRLSCAVSGFTFDNYAIGWFRQAPGKEREGVSCISRSDGSTYYADSVRGRFTISSDNAKNTVYLQMNSLKPEDTAVYYCAAETSADSGEFRFGWVLKPSLYDYWGQGTQVTVSSAAAYPYDVPDYGSHHHHHH

SEQ ID NO: 443 - protein, 148 aa, Artificial Sequence
  Synthetic polymer.
QVQLQESGGGLVQAGGSLRLSCAASGRAFSSYFMGWFRQTPGKEREFVANIGWTGDMTYYADSVKGRFTISRDNAKNTVYLQMNSLKPEDTAVYYCAAAGSAYSGSYWNITMAANYDYWGQGTQVTVSSAAAYPYDVPDYGSHHHHHH

SEQ ID NO: 444 - protein, 145 aa, Artificial Sequence
  Synthetic polymer.
QVQLQESGGGLVQAGGSLRLSCAASTPTFSSYNMGWFRQAPGKEREFVAAIIWSGSMTYYADSMKGRFTVSIDNAKNTVYLQMNSLKPEDTAVYYCAAQRIFGAQPMDLSGDYEYWGQGTQVTVSSAAAYPYDVPDYGSHHHHHH

SEQ ID NO: 445 - protein, 150 aa, Artificial Sequence
  Synthetic polymer.
QVQLQESGGGLVQAGGSLRLSCATFGFTFDDYAIAWFRQAPGKEREGISCISNTDSSTYYADSVKGRFTISSDSAKNTVHLQMSSLKPEDTAVYYCAADGNVWSPPICGSAGPPPGGMDYWGKGTQVTVSSAAAYPYDVPDYGSHHHHHH

SEQ ID NO: 446 - protein, 145 aa, Artificial Sequence
  Synthetic polymer.
QVQLQESGGGLVQAGGSLRLSCKASGGTFSGYIMGWFRQAPGKEREFVAANTWSGGPTYYSDSVKGRFTISRDNAKNTVYLQMNTLKPEDTAVYQCAARDYRGIKDLDLKGDYDYWGQGTQVTVSSAAAYPYDVPDYGSHHHHHH

SEQ ID NO: 447 - protein, 151 aa, Artificial Sequence
  Synthetic polymer.
QVQLQESGGGLVQAGDSLKLSCATSGRSFSSYTIAWFRQAPGKEREGISCISSDGSTGYADSVRGRFTISSDNAKNTVYLQMNSLKPEDTAVYYCAADFNVWSPPICGSIWYGPPPRGMDYWGKGTQVTVSSAAAYPYDVPDYGSHHHHHH

SEQ ID NO: 448 - protein, 152 aa, Artificial Sequence
  Synthetic polymer.
QVQLQESGGGLVQAGGYLRLSCAASGFSSDDYTIGWFRQAPGKEREGISCYSSSDGSTGFADSVKGRFTISSDNAKNTVYLQMNNLRPEDTAVYYCAADSNVWSPPICGSRWYGPPPGGMAYWGKGTQVTVSSAAAYPYDVPDYGSHHHHHH

SEQ ID NO: 449 - protein, 151 aa, Artificial Sequence
  Synthetic polymer.
QVQLQESGGGLAQVGGSLRLSCTASGFTFDDYTIGWFRQAPGKEREGISCISSDGSTGYADSVKGRFTISSDNAKNTVYLQMNSLKPEDTAVYYCAADFNVWSPPICGSNWYGPPPGGMDYWGKGTQVTVSSAAAYPYDVPDYGSHHHHHH

SEQ ID NO: 450 - protein, 152 aa, Artificial Sequence
  Synthetic polymer.
QVQLQESGGGLVQAGGSLRLSCAASGFSSDDYTIGWFRQAPGKEREGIGCIKSSDGTTGYADSVKGRFTISSDNAKNTVYLQMNSLKPEDTAVYYCAADFNVWSPPICGSIWYGPPPGGMDYWGKGTQVTVSSAAAYPYDVPDYGSHHHHHH

SEQ ID NO: 451 - protein, 150 aa, Artificial Sequence
  Synthetic polymer.
QVQLQESGGGLAQAGGSLRLSCAASGFTFDQYTIAWFRQAPGKEREGVSCISNTDSSTYYADSVKGRFTISSDNAKNTVYLQMSSLKPEDTAVYYCAADGNVWSPPICGSAGPPPGGMDYWGKGTQVTVSSAAAYPYDVPDYGSHHHHHH

SEQ ID NO: 452 - protein, 144 aa, Artificial Sequence
  Synthetic polymer.
QVQLQESGGGLVQAGGSLRLSCAASGRTFSSYAMAWFRQAPGKEREFVAAIAWSAGSTYYADSVKGRFAISRDNAENTVYLQMNSLKPEDTAVYYCAARIITVATMRLDSDYDYWGQGTQVTVSSAAAYPYDVPDYGSHHHHHH

SEQ ID NO: 453 - protein, 150 aa, Artificial Sequence
  Synthetic polymer.
QVQLQESGGGLVQAGGSLRLSCAASGFAFDGYAIGWFRQAPGKEREGVSCISSKEGSTYYADSVKGRFTISSDNAKNTVYLQMSSLKPEDTAVYYCAADGNVWSPPICGSAGPPPGGMDYWGKGTQVTVSSAAAYPYDVPDYGSHHHHHH

SEQ ID NO: 454 - protein, 152 aa, Artificial Sequence
  Synthetic polymer.
QVQLQESGGGLVQAGGSLRLSCAASGFSSDDYTIAWFRRAPGKEREGISCISSSDGSTGYADSVKGRFTITSDSAKNTVYLQMNSLKPEDTAVYYCAADSNVWSPPICGRTWYGPPPGGMDYWGKGTQVTVSSAAAYPYDVPDYGSHHHHHH

SEQ ID NO: 455 - protein, 152 aa, Artificial Sequence
  Synthetic polymer.
QVQLQESGGGLVQPGGSLRLSCAASGFSSDDYTIGWFRQAPGKEREGISCYSSRDGTTGYADSVKGRFTISSDNAKNTVYLQMNSLKPEDTAVYYCAADFNVWSPPICGSIWYGPPPGGMAYWGQGTQVTVSSAAAYPYDVPDYGSHHHHHH

SEQ ID NO: 456 - protein, 151 aa, Artificial Sequence
  Synthetic polymer.
QVQLQESGGGLVQAGGSLRLSCAASGFTFDDYTIGWFRQAPGKEREGISCISSDGSTGYADSVKGRFTISSDNAKNTVYLQMNSLKPEDTAVYYCAADFNVWSPPICGSNWYGPPPGGMDYWGKGTQVTVSSAAAYPYDVPDYGSHHHHHH

SEQ ID NO: 457 - protein, 152 aa, Artificial Sequence
  Synthetic polymer.
QVQLQESGGGLVQAGGSLRLSCAASGFSSDDYTIGWFRQAPGKEREGISCYSSSDGSTGYADSVKGRFTISSDNAKNTVYLQMNSLKPEDTAVYYCAADFNVWSPPICGSSWYGPPPGGMDYWGKGTQVTVSSAAAYPYDVPDYGSHHHHHH

SEQ ID NO: 458 - protein, 152 aa, Artificial Sequence
  Synthetic polymer.
QVQLQESGGGLVQAGGSLRLSCAASGFSSDDYTIGWFRQAPGKEREGISCFSSSDGSTGFADSVKGRFTISSDNATNTVYLEMNSLKPEDTAVYYCAADFNVWSPPICGSRWYGPPPGGMEYWGKGTQVTVSSAAAYPYDVPDYGSHHHHHH

SEQ ID NO: 459 - protein, 150 aa, Artificial Sequence
  Synthetic polymer.
QVQLQESGGGLVQAGGSLRLSCATFGFSFDDYAIAWFRQAPGKEREGISCISNTDSSTFYADSVKGRFTISSDNAKNTVHLQMSSLKPEDTAVYYCAADGNVWSPPICGSAGPPPGGMDYWGKGTQVTVSSAAAYPYDVPDYGSHHHHHH

SEQ ID NO: 460 - protein, 152 aa, Artificial Sequence
  Synthetic polymer.
QVQLQESGGGLVQAGGSLRLSCAASGFSSDDYTIGWFRQAPGKEREGISCYSSSDGSTGFADSVKGRFTISSDNAKNTVYLQMNSLRPEDTAVYYCAADFNVWSPPICGSRWYGPPPGGMAYWGKGTQVTVSSAAAYPYDVPDYGSHHHHHH

SEQ ID NO: 461 - protein, 151 aa, Artificial Sequence
  Synthetic polymer.
QVQLQESGGGLVQVGGSLRLSCTISGFTGNDLAIGWFRQAPGKDQREGISCISNTDSSTYYADSVKGRFTISSDNAKNTVHLQMSSLKPEDTAVYYCAADGNVWSPPICGSAGPPPGGMDYWGKGTQVTVSSAAAYPYDVPDYGSHHHHHH

SEQ ID NO: 462 - protein, 152 aa, Artificial Sequence
  Synthetic polymer.
QVQLQESGGGLVQAGGSLRLSCAASGFSSDDYTIAWFRRAPGKEREGISCISSSDGSTGYADSVKGRFTISSDNAKNTVYLQMTSLKPEDTAVYYCAADSNVWSPPICGKTWYGPPPGGMDYWGKGTQVTVSSAAAYPYDVPDYGSHHHHHH

SEQ ID NO: 463 - protein, 140 aa, Artificial Sequence
  Synthetic polymer.
QVQLQESGGGLVQAGDSLRLSCAGSEGTLSSYGIGWFRQAPGKEREFVGGINWSGDSTDYADSVKGRFTISRDSAKNTVYLQMNSLKPEDTAVYYCAAGESGVWVGGLDYWGQGTQVTVSSAAAYPYDVPDYGSHHHHHH

SEQ ID NO: 464 - protein, 152 aa, Artificial Sequence
  Synthetic polymer.
QVQLQESGGGLVQAGGSLRLSCAASGFSSDDYTIAWFRRAPGKEREGISCFSSSDGSAGYADSVKGRFTVSSDNAKNTVYLQMNSLKPEDTAVYYCAADSNVWSPPICGSTWYGPPPGGMAYWGKGTQVTVSSAAAYPYDVPDYGSHHHHHH

SEQ ID NO: 465 - protein, 150 aa, Artificial Sequence
  Synthetic polymer.
QVQLQESGGGLVQAGGSLRLSCATSGFTFDDYAIAWFRQAPGKEREGVSCISNTDSSTYYADSVKGRFTISSDNAKNTVYLQMSSLKPEDTAVYYCAADGNVWSPPICGSAGPPPGGMDYWGKGTQVTVSSAAAYPYDVPDYGSHHHHHH

SEQ ID NO: 466 - protein, 152 aa, Artificial Sequence
  Synthetic polymer.
QVQLQESGGGLVQAGGSLRLSCEVSGLSSDDYTIGWFRQAPGKEREGFSCFSTRDGNAGYADSVKGRFTISSDNAKNTVYLQMNNLKPEDTAVYYCAADFNVWSPPICGSRWYGPPPGGMDYWGKGTQVTVSSAAAYPYDVPDYGSHHHHHH

SEQ ID NO: 467 - protein, 152 aa, Artificial Sequence
  Synthetic polymer.
QVQLQESGGGLVQAGGSLRLSCEVSGLSSDDYTIGWFRQAPGKKREGFSCFSSRDGSTGYADSVKGRFTISSDNAKNTVYLQMNSLKPEDTAVYYCAADFNVWSPPICGSRWYGPPPGGMDYWGKGTQVTVSSAAAYPYDVPDYGSHHHHHH

SEQ ID NO: 468 - protein, 152 aa, Artificial Sequence
  Synthetic polymer.
QVQLQESGGGLVQAGGSLRLSCAASGFSSDDYTIGWFRQAPGKEREGFSCFSSRDGSTGYADSVKGRFTISSDNAKNTVYLQMNSLKPEDTAVYYCAADFNVWSPPICGSRWYGPPPGGMDYWGKGTQVTVSSAAAYPYDVPDYGSHHHHHH

SEQ ID NO: 469 - protein, 151 aa, Artificial Sequence
  Synthetic polymer.
QVQLQESGGGLVQAGGSLRLSCAASGFSFDDYTIGWFRQVPGKEREGISCISSDGSTGYADSVKGRFTISSDNAKNTVYLQINSLKPEDTAVYYCAADFNVWSPPICGSIWYGPPPGGMDYWGKGTQVTVSSAAAYPYDVPDYGSHHHHHH

SEQ ID NO: 470 - protein, 150 aa, Artificial Sequence
  Synthetic polymer.
QVQLQESGGGLVQAGGSLRLSCATFGFTFDDYAIAWFRQAPGKEREGISCISNTDSSTYYADSVKGRFTISSDNAKNTVHLQMSSLKPEDTAVYYCAADGNVWSPPICGSAGPPPGGMDYWGKGTQVTVSSAAAYPYDVPDYGSHHHHHH

SEQ ID NO: 471 - protein, 150 aa, Artificial Sequence
  Synthetic polymer.
  misc_feature (19)..(19): Xaa can be any naturally occurring amino acid
QVQLQESGGGLVQAGGSLXLSCAASGFTFDDYAIGWFRQAPGKEREGVSCISSPDGSTYYADSVKGRFTISSDNAKNTVYLQMNSLKPEDTAVYYCAADFNVWSPPICGSVGPPPGGMDYWGKGTQVTVSSAAAYPYDVPDYGSHHHHHH

SEQ ID NO: 472 - protein, 152 aa, Artificial Sequence
  Synthetic polymer.
QVQLQESGGGLVQAGASLRLSCKASGFTFGDYTIGWFRQAPGKEREGISCYSSSDGNTGYADSVKGRFTISSDNAKNTVYLQMNSLRPEDTAVYYCAADFNVWSPPICGSSWYGPPPGGMAYWGKGTQVTVSSAAAYPYDVPDYGSHHHHHH

SEQ ID NO: 473 - protein, 140 aa, Artificial Sequence
  Synthetic polymer.
QVQLQESGGGLVQAGDSLRLSCAGSEGTFSSYGIGWFRQAPGKEREFVGGINWSGDSTDYADSVKGRFTISRDNAKNTVYLQMNSLKPEDTAVYYCAAGESGVWVGGLDYWGQGTQVTVSSAAAYPYDVPDYGSHHHHHH

SEQ ID NO: 474 - protein, 152 aa, Artificial Sequence
  Synthetic polymer.
QVQLQESGGGLVQAGGSLRLSCAASGFSSDDYTIGWFRQAPGKEREGISCFSSSDGSTGFADSVKGRFTISSDNATNTVYLQMNSLKPEDTAVYYCAADFNVWSPPICGSSWYGPPPGGMEYWGKGTQVTVSSAAAYPYDVPDYGSHHHHHH

SEQ ID NO: 475 - protein, 150 aa, Artificial Sequence
  Synthetic polymer.
QVQLQESGGGLVQAGDSLRLSCTASGVSIGDYNIGWFRQAPGKEREGVSCISSGDGTTYYTDSVKGRFTISTDNAKNTVYLQMNSLKPEDTAVYYCAADGNVWSPPICGSAGPPPGGMDYWGKGTQVTVSSAAAYPYDVPDYGSHHHHHH

SEQ ID NO: 476 - protein, 152 aa, Artificial Sequence
  Synthetic polymer.
QVQLQESGGGLVQAGGSLRLSCAASGFTFDDYTIAWFRQAPGGKEREGISCISSDGSTGYADSVKGRFTISSDNAKNMVYLQMNSLKPEDTALYYCAADFNVWSPPICSSNWYGPPPRGMDYWGKGTQVTVSSAAAYPYDVPDYGSHHHHHH

SEQ ID NO: 477 - protein, 151 aa, Artificial Sequence
  Synthetic polymer.
QVQLQESGGGLVQAGGSLRLSCAASGFTFDDYTIAWFRQAPGKEREGISCISSDGSTGYADSVRGRFTISSDNAKNTVYLQMNSLKPEDTAVYYCAADFNVWSPPICGSIWYGPPPRGMDYWGKGTQVTVSSAAAYPYDVPDYGSHHHHHH

SEQ ID NO: 478 - protein, 118 aa, Artificial Sequence
  Synthetic polymer.
EVQLVESGGGLVQPGGSLRLSCAASGFNIKDTYIHWVRQAPGKGLEWVARIDPANDNTLYASKFQGRATISADTSKNTAYLQMNSLRAEDTAVYYCGRGYGYYVFDHWGQGTLVTVSS

SEQ ID NO: 479 - protein, 118 aa, Artificial Sequence
  Synthetic polymer.
QVQLVQSGAEVKKPGATVKHSCKVSGFNHKDTYIHWVQQAPGKGLEWMGRHDPANDNTLYASKFQGRVTHTADTSTDTAYMELSSLRSEDTAVYYCARGYGYYVFDHWGQGTLVTVSS

SEQ ID NO: 480 - protein, 107 aa, Artificial Sequence
  Synthetic polymer.
DVQITQSPSSLSASVGDRVTITCRTSRSISQYLAWYQQKPGKVPKLLIYSGSTLQSGVPSRFSGSGSGTDFTLTISSLQPEDVATYYCQQHNENPLTFGGGTKVEIK

SEQ ID NO: 481 - protein, 10 aa, Artificial Sequence
  Synthetic polymer.
GFSMDYYAIA

SEQ ID NO: 482 - protein, 10 aa, Artificial Sequence
  Synthetic polymer.
GFSMDYYAIA

SEQ ID NO: 483 - protein, 10 aa, Artificial Sequence
  Synthetic polymer.
GFSVDYYAIA

SEQ ID NO: 484 - protein, 10 aa, Artificial Sequence
  Synthetic polymer.
GFSMDYYAIA

SEQ ID NO: 485 - protein, 10 aa, Artificial Sequence
  Synthetic polymer.
GGFNRVSYMG

SEQ ID NO: 486 - protein, 10 aa, Artificial Sequence
  Synthetic polymer.
GGFNRVSYMG

SEQ ID NO: 487 - protein, 10 aa, Artificial Sequence
  Synthetic polymer.
GIIKSINFMG

SEQ ID NO: 488 - protein, 10 aa, Artificial Sequence
  Synthetic polymer.
GFILDYYGIG

SEQ ID NO: 489 - protein, 10 aa, Artificial Sequence
  Synthetic polymer.
GLSLDYDGVG

SEQ ID NO: 490 - protein, 10 aa, Artificial Sequence
  Synthetic polymer.
GFILDYYGIG

SEQ ID NO: 491 - protein, 10 aa, Artificial Sequence
  Synthetic polymer.
GRTFSSLGMG

SEQ ID NO: 492 - protein, 10 aa, Artificial Sequence
  Synthetic polymer.
GRTFSSLGMG

SEQ ID NO: 493 - protein, 10 aa, Artificial Sequence
  Synthetic polymer.
GFAFGSYDMG

SEQ ID NO: 494 - protein, 10 aa, Artificial Sequence
  Synthetic polymer.
GFSFGNNDMS

SEQ ID NO: 495 - protein, 11 aa, Artificial Sequence
  Synthetic polymer.
CITGSDFMVDT

SEQ ID NO: 496 - protein, 11 aa, Artificial Sequence
  Synthetic polymer.
CITGSDFMVDT

SEQ ID NO: 497 - protein, 11 aa, Artificial Sequence
  Synthetic polymer.
CITGSDFMVDT

SEQ ID NO: 498 - protein, 11 aa, Artificial Sequence
  Synthetic polymer.
CITGSDFMVDT

SEQ ID NO: 499 - protein, 8 aa, Artificial Sequence
  Synthetic polymer.
SVTSGGEI

SEQ ID NO: 500 - protein, 8 aa, Artificial Sequence
  Synthetic polymer.
SVTSGGEI

SEQ ID NO: 501 - protein, 8 aa, Artificial Sequence
  Synthetic polymer.
STTSDGRT

SEQ ID NO: 502 - protein, 9 aa, Artificial Sequence
  Synthetic polymer.
CISSSDGST

SEQ ID NO: 503 - protein, 9 aa, Artificial Sequence
  Synthetic polymer.
CISSSDGST

SEQ ID NO: 504 - protein, 9 aa, Artificial Sequence
  Synthetic polymer.
CISSSDGST

SEQ ID NO: 505 - protein, 9 aa, Artificial Sequence
  Synthetic polymer.
AIAWNGAST

SEQ ID NO: 506 - protein, 9 aa, Artificial Sequence
  Synthetic polymer.
AIAWNGAST

SEQ ID NO: 507 - protein, 9 aa, Artificial Sequence
  Synthetic polymer.
GINSGGRIT

SEQ ID NO: 508 - protein, 9 aa, Artificial Sequence
  Synthetic polymer.
AINSGGGST

SEQ ID NO: 509 - protein, 19 aa, Artificial Sequence
  Synthetic polymer.
AVRSTANTLCPSHYSVMDY

SEQ ID NO: 510 - protein, 19 aa, Artificial Sequence
  Synthetic polymer.
AVRSTANTLCPSHYSIMDY

SEQ ID NO: 511 - protein, 19 aa, Artificial Sequence
  Synthetic polymer.
AVRSTANTLCPSHYSVMDY

SEQ ID NO: 512 - protein, 14 aa, Artificial Sequence
  Synthetic polymer.
NADIWVSDARMYNY

SEQ ID NO: 513 - protein, 14 aa, Artificial Sequence
  Synthetic polymer.
NADIWVSDARMYNY

SEQ ID NO: 514 - protein, 14 aa, Artificial Sequence
  Synthetic polymer.
NADIWLPSDRMYNY

SEQ ID NO: 515 - protein, 13 aa, Artificial Sequence
  Synthetic polymer.
ATATLCDGGIWGY

SEQ ID NO: 516 - protein, 13 aa, Artificial Sequence
  Synthetic polymer.
ATATLCDGGIWGY

SEQ ID NO: 517 - protein, 13 aa, Artificial Sequence
  Synthetic polymer.
ATATLCDGGIWGY

SEQ ID NO: 518 - protein, 16 aa, Artificial Sequence
  Synthetic polymer.
AASGLGSVWTANEYDY

SEQ ID NO: 519 - protein, 16 aa, Artificial Sequence
  Synthetic polymer.
AASGLGSVWTANEYDY

SEQ ID NO: 520 - protein, 15 aa, Artificial Sequence
  Synthetic polymer.
AQGDRSSWHYYGMDY

SEQ ID NO: 521 - protein, 13 aa, Artificial Sequence
  Synthetic polymer.
ATKSDPMTNEYDL

SEQ ID NO: 522 - protein, 147 aa, Artificial Sequence
  Synthetic polymer.
QVQLQESGGGLVQPGGSLRLSCAASGFSMDYYAIAWFRQAPGKEREEISCITGSDFMVDTYYVASVKGRFTISRDNAENTAYLQMNNLKPEDTGVYFCAVRSTANTLCPSHYSVMDYWGKGTQVTVSSAAAYPYDVPDYGSHHHHHH

SEQ ID NO: 523 - protein, 147 aa, Artificial Sequence
  Synthetic polymer.
QVQLQESGGGLVQAGGSLRLSCAASGFSMDYYAIAWFRQAPGKEREEISCITGSDFMVDTYYVASVKGRFTISRDNAENTAYLQMNNLKPEDTGVYFCAVRSTANTLCPSHYSVMDYWGKGTQVTVSSAAAYPYDVPDYGSHHHHHH

SEQ ID NO: 524 - protein, 146 aa, Artificial Sequence
  Synthetic polymer.
QVQLQESGGGLVQPGGSLRLSCSASGFSVDYYAIAWFRQAPGKEREEISCITGSDFMVDTYYVASVKGRFTISRDNAKNTAYLQMNSLKPEDTGVYFCAVRSTANTLCPSHYSIMDYWGKGTQVTVSSAAAYPYDVPDYGSHHHHH

SEQ ID NO: 525 - protein, 147 aa, Artificial Sequence
  Synthetic polymer.
QVQLQESGGGLVQPGGSLRLSCSASGFSMDYYAIAWFRQAPGKEREEISCITGSDFMVDTYYVASVKGRFTISRDNAKNTAHLQMNSLKPEDTGVYFCAVRSTANTLCPSHYSVMDYWGKGTQVTVSSAAAYPYDVPDYGSHHHHHH

SEQ ID NO: 526 - protein, 139 aa, Artificial Sequence
  Synthetic polymer.
QVQLQESGGGLVQAGGSLRLSCAASGGFNRVSYMGWYRQAPGTKRELVASVTSGGEITIADSVKGRFTVSRDNSKNTLYLQMNGLKPEDGATYWCNADIWVSDARMYNYWGQGTQVTVSSAAAYPYDVPDYGSHHHHHH

SEQ ID NO: 527 - protein, 139 aa, Artificial Sequence
  Synthetic polymer.
QVQLQESGGGLVQTGESLRLSCAASGGFNRVSYMGWYRQAPGSKRELVASVTSGGEITVADSVKGRFTVSRDNNKNTLYLQMNGLKPEDGATYWCNADIWVSDARMYNYWGQGTQVTVSSAAAYPYDVPDYGSHHHHHH

SEQ ID NO: 528 - protein, 139 aa, Artificial Sequence
  Synthetic polymer.
QVQLQESGGGLVQTGESLRLSCAASGIIKSINFMGWYRQPPGTKRELVASTTSDGRTTVADSVKGRFTISRDNAKNTIYLEMSSLKPEDTATYWCNADIWLPSDRMYNYWGQGTQVTVSSAAAYPYDVPDYGSHHHHHH

SEQ ID NO: 529 - protein, 139 aa, Artificial Sequence
  Synthetic polymer.
QVQLQESGGGLVQAGGSLRLSCAVSGFILDYYGIGWFRQAPGKEREAVSCISSSDGSTYYADSVKGRFTISRDNALNTLYLQMNSLKPEDTAVYHCATATLCDGGIWGYWGQGTQVTVSSAAAYPYDVPDYGSHHHHHH

SEQ ID NO: 530 - protein, 139 aa, Artificial Sequence
  Synthetic polymer.
QVQLQESGGGLAQAGGSLRLSCEGSGLSLDYDGVGWFRQAPGKEREAVSCISSSDGSTYYADSVKGRFTISRGNALNTLYLQMNSLKPEDTAVYYCATATLCDGGIWGYWGQGTQVTVSSAAAYPYDVPDYGSHHHHHH

SEQ ID NO: 531 - protein, 139 aa, Artificial Sequence
  Synthetic polymer.
QVQLQESGGGSVQPGGSLRLSCAVSGFILDYYGIGWFRQAPGKEREAVSCISSSDGSTYYADSVKGRFTISRDNALNTLYLQMNSLKPEDTAVYYCATATLCDGGIWGYWGQGTQVTVSSAAAYPYDVPDYGSHHHHHH

SEQ ID NO: 532 - protein, 143 aa, Artificial Sequence
  Synthetic polymer.
QVQLQESGGGSVQAGDSLRLSCTASGRTFSSLGMGWFRQAPGKEREFVSAIAWNGASTYYTESVKGRFTISRDDAKNTVYLQMNSLKPTDTAVYFCAASGLGSVVVTANEYDYWGQGTQVTVSSAAAYPYDVPDYGSHHHHHH

SEQ ID NO: 533 - protein, 143 aa, Artificial Sequence
  Synthetic polymer.
QVQLQESGGGSVQPGKSLRLSCAASGRTFSSLGMGWFRQAPGKEREFVSAIAWNGASTYYTESVKGRFTISRDDAKNTVYLQMNSLKPTDTAVYFCAASGLGSVVVTANEYDYWGQGTQVTVSSAAAYPYDVPDYGSHHHHHH

SEQ ID NO: 534 - protein, 141 aa, Artificial Sequence
  Synthetic polymer.
QVQLQESGGGLVQPGGSLRLSCTTSGFAFGSYDMGWVRQAPGKGPEWVSGINSGGRITDYADSVTGRFTISRDNAKNTLYLQMNSLKPEDTAVYYCAQGDRSSWHYYGMDYWGKGTQVTVSSAAAYPYDVPDYGSHHHHHH

SEQ ID NO: 535 - protein, 139 aa, Artificial Sequence
  Synthetic polymer.
  misc_feature (112)..(112): Xaa can be any naturally occurring amino acid
QVQLQESGGGLVQPGGSLRLSCAASGFSFGNNDMSWVRQAPGKGPEWVSAINSGGGSTYYADSVKGRFTISRDNAKNTLYLQMNSLKPEDTAVYYCATKSDPMTNEYDLWGXGTQVTVSSAAAYPYDVPDYGSHHHHHH

SEQ ID NO: 536 - protein, 447 aa, Artificial Sequence
  Synthetic polymer.
QVQLVQSGVEVKKPGASVKVSCKASGYTFTNYYMYWVRQAPGQGLEWMGGINPSNGGTNFNEKFKNRVTLTTDSSTTTAYMELKSLQFDDTAVYYCARRDYRFDMGFDYWGQGTTVTVSSASTKGPSVFPLAPCSRSTSESTAALGCLVKDYFPEPVTVSWNSGALTSGVHTFPAVLQSSGLYSLSSVVTVPSSSLGTKTYTCNVDHKPSNTKVDKRVESKYGPPCPPCPAPEFLGGPSVFLFPPKPKDTLMISRTPEVTCVVVDVSQEDPEVQFNWYVDGVEVHNAKTKPREEQFNSTYRVVSVLTVLHQDWLNGKEYKCKVSNKGLPSSIEKTISKAKGQPREPQVYTLPPSQEEMTKNQVSLTCLVKGFYPSDIAVEWESNGQPENNYKTTPPVLDSDGSFFLYSRLTVDKSRWQEGNVFSCSVMHEALHNHYTQKSLSLSLGK

SEQ ID NO: 537 - protein, 218 aa, Artificial Sequence
  Synthetic polymer.
EIVLTQSPATLSLSPGERATLSCRASKGVSTSGYSYLHWYQQKPGQAPRLLIYLASYLESGVPARFSGSGSGTDFTLTISSLEPEDFAVYYCQHSRDLPLTFGGGTKVEIKRTVAAPSVFIFPPSDEQLKSGTASVVCLLNNFYPREAKVQWKVDNALQSGNSQESVTEQDSKDSTYSLSSTLTLSKADYEKHKVYACEVTHQGLSSPVTKSFNRGEC

SEQ ID NO: 538 - protein, 440 aa, Artificial Sequence
  Synthetic polymer.
QVQLVESGGGVVQPGRSLRLDCKASGITFSNSGMHWVRQAPGKGLEWVAVIWYDGSKRYYADSVKGRFTISRDNSKNTLFLQMNSLRAEDTAVYYCATNDDYWGQGTLVTVSSASTKGPSVFPLAPCSRSTSESTAALGCLVKDYFPEPVTVSWNSGALTSGVHTFPAVLQSSGLYSLSSVVTVPSSSLGTKTYTCNVDHKPSNTKVDKRVESKYGPPCPPCPAPEFLGGPSVFLFPPKPKDTLMISRTPEVTCVVVDVSQEDPEVQFNWYVDGVEVHNAKTKPREEQFNSTYRVVSVLTVLHQDWLNGKEYKCKVSNKGLPSSIEKTISKAKGQPREPQVYTLPPSQEEMTKNQVSLTCLVKGFYPSDIAVEWESNGQPENNYKTTPPVLDSDGSFFLYSRLTVDKSRWQEGNVFSCSVMHEALHNHYTQKSLSLSLGK

SEQ ID NO: 539 - protein, 214 aa, Artificial Sequence
  Synthetic polymer.
EIVLTQSPATLSLSPGERATLSCRASQSVSSYLAWYQQKPGQAPRLLIYDASNRATGIPARFSGSGSGTDFTLTISSLEPEDFAVYYCQQSSNWPRTFGQGTKVEIKRTVAAPSVFIFPPSDEQLKSGTASVVCLLNNFYPREAKVQWKVDNALQSGNSQESVTEQDSKDSTYSLSSTLTLSKADYEKHKVYACEVTHQGLSSPVTKSFNRGEC

SEQ ID NO: 540 - protein, 106 aa, Artificial Sequence
  Synthetic polymer.
EIVLTQSPSSLSASVGDRVTITCSARSSVSYMHWYQQKPGKAPKLLIYRTSNLASGVPSRFSGSGSGTDFTLTINSLQPEDFATYYCQQRSSFPLTFGGGTKLEIK

SEQ ID NO: 541 - protein, 106 aa, Artificial Sequence
  Synthetic polymer.
EIVLTQSPSSLSASVGDRVTITCSARSSVSYMHWFQQKPGKAPKLWIYRTSNLASGVPSRFSGSGSGTDYTLTINSLQPEDFATYYCQQRSSFPLTFGGGTKLEIK

SEQ ID NO: 542 - protein, 106 aa, Artificial Sequence
  Synthetic polymer.
EIVLTQSPSSLSASVGDRVTITCSARSSVSYMHWFQQKPGKAPKLWIYRTSNLASGVPSRFSGSGSGTDYCLTINSLQPEDFATYYCQQRSSFPLTFGGGTKLEIK

SEQ ID NO: 543 - protein, 106 aa, Artificial Sequence
  Synthetic polymer.
EIVLTQSPSSLSASVGDRVTITCSARSSVSYMHWFQQKPGKAPKLWIYRTSNLASGVPSRFSGSGSGTSYCLTINSLQPEDFATYYCQQRSSFPLTFGGGTKLEIK

SEQ ID NO: 544 - protein, 117 aa, Artificial Sequence
  Synthetic polymer.
QVQLVQSGSELKKPGASVKISCKASGYSFSNYGMNWVRQAPGQGLQWMGWINTDSGESTYAEEFKGRFVFSLDTSVSTAYLQITSLTAEDTGMYFCAKVGYDALDYWGQGTLVTVSS

SEQ ID NO: 545 - protein, 117 aa, Artificial Sequence
  Synthetic polymer.
QVQLVQSGSELKKPGASVKISCKASGYTFTNYGMNWVRQAPGQGLQWMGWINTDSGESTYAEEFKGRFVFSLDTSVSTAYLQITSLTAEDTGMYFCAKVGYDALDYWGQGTLVTVSS

SEQ ID NO: 546 - protein, 117 aa, Artificial Sequence
  Synthetic polymer.
QVQLVQSGSELKKPGASVKISCKASGYTFTNYGMNWVRQAPGQGLQWMGWINTDSGESTYAEEFKGRFVFSLDTSVNTAYLQITSLTAEDTGMYFCVRVGYDALDYWGQGTLVTVSS

SEQ ID NO: 547 - protein, 117 aa, Artificial Sequence
  Synthetic polymer.
QIQLVQSGSELKKPGASVKISCKASGYTFTNYGMNWVRQAPGQGLQWMGWINTDSGESTYAEEFKGRFVFSLDTSVNTAYLQITSLTAEDTGMYFCVRVGYDALDYWGQGTLVTVSS

SEQ ID NO: 548 - protein, 117 aa, Artificial Sequence
  Synthetic polymer.
QIQLVQSGSELKKPGASVKISCKASGYTFTNYGMNWVKQAPGQGLKWMGWINTDSGESTYAEEFKGRFAFSLDTSVNTAYLQITSLNAEDTGMYFCVRVGYDALDYWGQGTLVTVSS

SEQ ID NO: 549 - protein, 106 aa, Artificial Sequence; identical to SEQ ID NO: 543
  Synthetic polymer.

SEQ ID NO: 550 - protein, 117 aa, Artificial Sequence; identical to SEQ ID NO: 546
  Synthetic polymer.

SEQ ID NO: 551 - protein, 254 aa, Artificial Sequence
  Synthetic polymer.
LFTVTVPKELYIIEHGSNVTLECNFDTGSHVNLGAITASLQKVENDTSPHRERATLLEEQLPLGKASFHIPQVQVRDEGQYQCIIIYGVAWDYKYLTLKVKASYRKINTHILKVPETDEVELTCQATGYPLAEVSWPNVSVPANTSHSRTPEGLYQVTSVLRLKPPPGRNFSCVFWNTHVRELTLASIDLQSQMEPRTHPTWLLHIFIPFCITAFTFIATVIALRKQLCQKLYSSKDTTKRPVTTTKREVNSAI

SEQ ID NO: 552 - protein, 453 aa, Artificial Sequence
  Synthetic polymer.
MIFLLLMLSLELQLHQTAALFTVTVPKELYIIEHGSNVTLECNFDTGSHVNLGAITASLQKVENDTSPHRERATLLEEQLPLGKASFHIPQVQVRDEGQYQCIIIYGVAWDYKYLTLKVKASYRKINTHILKVPETDEVELTCQATGYPLAEVSWPNVSVPANTSHSRTPEGLYQVTSVLRLKPPPGRNFSCVFWNTHVRELTLASIDLQSQMEPRTHPTWEPKSCDKTHTCPPCPAPELLGGPSVFLFPPKPKDTLMISRTPEVTCVVVDVSHEDPEVKFNWYVDGVEVHNAKTKPREEQYNSTYRVVSVLTVLHQDWLNGKEYKCKVSNKALPAPIEKTISKAKGQPREPQVYTLPPSRDELTKNQVSLTCLVKGFYPSDIAVEWESNGQPENNYKTTPPVLDSDGSFFLYSKLTVDKSRWQQGNVFSCSVMHEALHNHYTQKSLSLSPGK

SEQ ID NO: 553 - protein, 29 aa, Artificial Sequence
  Synthetic polymer.
SNTSESFKSNTSESFFRVTQLAPKAQIKE

SEQ ID NO: 554 - protein, 119 aa, Artificial Sequence
  Synthetic polymer.
EVQLQQSGPVLVKPGASVKMSCKASGYTFTDYYMNWVKQSHGKSLEWIGNINPYNGGTTYNQKFKGKATLTVDKSSRTAYMEINSLTSEDSAVYYCARGRIYDGSLDYWGQGTALTVSS

SEQ ID NO: 555 - protein, 106 aa, Artificial Sequence
  Synthetic polymer.
DIQMTQFPSSLCASQGGKVTVTCKASQDINNYMAWYQHKPGKGPRLLIHYTSTLLSGIPSRFSGSGSGRDYSFSISNLEPEDIATYYCLQYDNLWTFGGGTKLEIK

SEQ ID NO: 556 - protein, 116 aa, Artificial Sequence
  Synthetic polymer.
QVQLQQSGAELAKPGASVRLSCKASGYTFTNYWMHWVKQRPGQGLEWIGHINPSSGFTTYNQNFKDKATLTADKSSNTAYMQLSSLTYEDSAVYFCAREDYDVDYWGQGTTLTVSS

SEQ ID NO: 557 - protein, 107 aa, Artificial Sequence
  Synthetic polymer.
DIVMTQSQKFMSTSVGDRVSVTCKASQSVDTNVAWYQQKPGQSPKALIFSASYRYSGVPDRFTGSGSGTDFTLTINSVQSEDLAEYFCQQYNSYPYTFGSGTKLEIK

SEQ ID NO: 558 - protein, 122 aa, Artificial Sequence
  Synthetic polymer.
EVQLVESGGGLVKPGGSLKLSCAASGFTFSDYGMHWVRQAPEKGLEWVAYISSGSYTIYYTDTVKGRFTISRDNAKNTLFLQMTSLRSEDTAMYYCARRGYGSFYEYYFDYWGQGTTLTVSS

SEQ ID NO: 559 - protein, 106 aa, Artificial Sequence
  Synthetic polymer.
QIVLTQSPALMSASPGEKVTMTCSASSSVSYMYWYQQKPRSSPKPWIYLTSNLASGVPARFSGSGSGTSYSLTISSMEAEDAATYYCQQWSSNPFTFGSGTKLEIK

SEQ ID NO: 560 - protein, 119 aa, Artificial Sequence
  Synthetic polymer.
EVQLVESGGGLVQAGKSLRLSCAASGSIFSIHAMGWFRQAPGKEREFVAAITWSGGITYYEDSVKGRFTISRDNAKNTVYLQMNSLKPEDTAIYYCAADRAESSWYDYWGQGTQVTVSS

SEQ ID NO: 561 - protein, 119 aa, Artificial Sequence
  Synthetic polymer.
EVQLVESGGGLVQAGGSLRLSCAASGSIASIHAMGWFRQAPGKEREFVAVITWSGGITYYADSVKGRFTISRDNAKNTVYLQMNSLKPEDTAIYYCAGDKHQSSWYDYWGQGTQVTVSS

SEQ ID NO: 562 - protein, 119 aa, Artificial Sequence
  Synthetic polymer.
EVQLVESGGGLVQAGGSLRLSCAASGSISSIHAMGWFRQAPGKEREFVAAITWSGGITYYADSLKGRFTISRDNAKNTGYLQMNSLKPEDTAIYYCAADRAQSSWYDYWGQGTQVTVSS

SEQ ID NO: 563 - protein, 119 aa, Artificial Sequence
  Synthetic polymer.
EVQLVESGGGLVQAGGSLGLSCAASGSIFSINAMAWFRQAPGKEREFVALISWSGGSTYYEDSVKGRFTISRDNAKNTVYLQMNSLKPEDTAIYYCAADRVDSNWYDYWGQGTQVTVSS

SEQ ID NO: 564 - protein, 120 aa, Artificial Sequence
  Synthetic polymer.
EVQLVESGGGLVQAGGSLRLSCAASGRAFSSGTMGWFRRAPGKEREFVASIPWSGGRIYYADSVKGRFTISRDNAQNTVYLQMNSLKPEDTAVYYCAVKERSTGWDFASWGQCTQVTVSS

SEQ ID NO: 565 - protein, 121 aa, Artificial Sequence
  Synthetic polymer.
QVQLVQSGAELKQPGASVKMSCKASGYSFTSSWIHWVKQAPGQGLEWIGYIYPSTGFTEYNQKFKDRATLTADKSTSTAYMELSSLRSEDSAVYYCARWRDSSGYHAMDYWGQGTSVTVSS

SEQ ID NO: 566 - protein, 121 aa, Artificial Sequence
  Synthetic polymer.
QVQLVQSGAEVKQPGASVKMSCKASGYSFTSSWIHWVKQAPGQGLEWIGYIYPSTGFTEYNQKFKDRATLTADKSTSTAYMELSSLRSEDTAVYYCARWRDSSGYHAMDYWGQGTSVTVSS

SEQ ID NO: 567 - protein, 121 aa, Artificial Sequence
  Synthetic polymer.
QVQLVQSGHEVKQPGASVKMSCKASGYSFTSSWIHWVKQAPGQGLEWIGYIYPSTGFTEYNQKFKDRATLTADKSTSTAYMELSSLRSEDTAVYYCARWRDSSGYHAMDYWGQGTLVTVSS

SEQ ID NO: 568 - protein, 121 aa, Artificial Sequence
  Synthetic polymer.
QVQLVQSGHEVKQPGASVKMSCKASGYSFTSSWIHWVRQAPGQGLEWIGYIYPSTGFTEYNQKFKDRATLTADKSTSTAYMELSSLRSEDTAVYYCARWRDSSGYHAMDYWGQGTLVTVSS

SEQ ID NO: 569 - protein, 121 aa, Artificial Sequence
  Synthetic polymer.
QVQLVQSGHEVKQPGASVKVSCKASGYSFTSSWIHWVRQAPGQGLEWIGYIYPSTGFTEYNQKFKDRATITADKSTSTAYMELSSLRSEDTAVYYCARWRDSSGYHAMDYWGQGTLVTVSS

SEQ ID NO: 570 - protein, 111 aa, Artificial Sequence
  Synthetic polymer.
DIVLTQSPASLTLSPGQRLTISCRASQSVSTSGYSYMHWYQQKPDQSPKLLIKFGSNLESGIPARFSGSGSGTDFTLTISSLEEEDFATYYCQHSWEIPYTFGQGTKLEIK

SEQ ID NO: 571 - protein, 111 aa, Artificial Sequence
  Synthetic polymer.
DIVLTQSPATLSLSPGQRLTISCRASQSVSTSGYSYMHWYQQKPDQSPKLLIKFGSNLESGIPARFSGSGSGTDFTLTISSLEPEDFATYYCQHSWEIPYTFGQGTKLEIK

SEQ ID NO: 572 - protein, 111 aa, Artificial Sequence
  Synthetic polymer.
EIVLTQSPATLSLSPGQRLTISCRASQSVSTSGYSYMHWYQQKPDQSPKLLIKFGSNLESGIPARFSGSGSGTDFTLTISSLEPEDFATYYCQHSWEIPYTFGQGTKLEIK

SEQ ID NO: 573 - protein, 111 aa, Artificial Sequence
  Synthetic polymer.
DIVLTQSPATLSLSPGQRLTISCRASQSVSTSGYSYMHWYQQKPDQSPKLLIKFGSNLESGIPARFSGSGSGTDFTLTISSLEPEDFAVYYCQHSWEIPYTFGQGTKLEIK

SEQ ID NO: 574 - protein, 10 aa, Artificial Sequence
  Synthetic polymer.
GFTLDYYAIG

SEQ ID NO: 575 - protein, 10 aa, Artificial Sequence
  Synthetic polymer.
GTIFSINHMD

SEQ ID NO: 576 - protein, 10 aa, Artificial Sequence
  Synthetic polymer.
GFTFDDYGMS

SEQ ID NO: 577 - protein, 10 aa, Artificial Sequence
  Synthetic polymer.
GFTLDYYAIN

SEQ ID NO: 578 - protein, 10 aa, Artificial Sequence
  Synthetic polymer.
GTIFSINRMD

SEQ ID NO: 579 - protein, 10 aa, Artificial Sequence
  Synthetic polymer.
GFTFSSYGMS

SEQ ID NO: 580 - protein, 10 aa, Artificial Sequence
  Synthetic polymer.
GKIFSGNDMG

SEQ ID NO: 581 - protein, 10 aa, Artificial Sequence
  Synthetic polymer.
GTIFSINRMD

SEQ ID NO: 582 - protein, 10 aa, Artificial Sequence
  Synthetic polymer.
GFTFSSYGMS

SEQ ID NO: 583 - protein, 10 aa, Artificial Sequence
  Synthetic polymer.
GFTFNDYAMS

SEQ ID NO: 584 - protein, 10 aa, Artificial Sequence
  Synthetic polymer.
GFNLDPYAIA

SEQ ID NO: 585 - protein, 10 aa, Artificial Sequence
  Synthetic polymer.
GFTFTAYAMS

SEQ ID NO: 586 - protein, 10 aa, Artificial Sequence
  Synthetic polymer.
GFTFDYYAIG

SEQ ID NO: 587 - protein, 10 aa, Artificial Sequence
  Synthetic polymer.
GFNLDPYAIA

SEQ ID NO: 588 - protein, 10 aa, Artificial Sequence
  Synthetic polymer.
GTIFSINRMD

SEQ ID NO: 589 - protein, 10 aa, Artificial Sequence
  Synthetic polymer.
GTIFSINRMD

SEQ ID NO: 590 - protein, 10 aa, Artificial Sequence
  Synthetic polymer.
GFTFSSYGMS

SEQ ID NO: 591 - protein, 10 aa, Artificial Sequence
  Synthetic polymer.
GFNLDPYAIG

SEQ ID NO: 592 - protein, 10 aa, Artificial Sequence
  Synthetic polymer.
GFNLDPYAIA

SEQ ID NO: 593 - protein, 10 aa, Artificial Sequence
  Synthetic polymer.
ESIFSIEAMG

SEQ ID NO: 594 - protein, 10 aa, Artificial Sequence
  Synthetic polymer.
GKIFSGNDMG

SEQ ID NO: 595 - protein, 10 aa, Artificial Sequence
  Synthetic polymer.
GFTLDYYAIG

SEQ ID NO: 596 - protein, 10 aa, Artificial Sequence
  Synthetic polymer.
GFTFSSYGMS

SEQ ID NO: 597 - protein, 10 aa, Artificial Sequence
  Synthetic polymer.
GTIFSINRMD

SEQ ID NO: 598 - protein, 10 aa, Artificial Sequence
  Synthetic polymer.
GFTFSSYGMS

SEQ ID NO: 599 - protein, 10 aa, Artificial Sequence
  Synthetic polymer.
GFNLDPYAIA

SEQ ID NO: 600 - protein, 10 aa, Artificial Sequence
  Synthetic polymer.
GRTFSISAMG

SEQ ID NO: 601 - protein, 10 aa, Artificial Sequence
  Synthetic polymer.
GFTLDYYAIN

SEQ ID NO: 602 - protein, 10 aa, Artificial Sequence
  Synthetic polymer.
GFTFSSYGMS

SEQ ID NO: 603 - protein, 10 aa, Artificial Sequence
  Synthetic polymer.
GFTFNDYAMS

SEQ ID NO: 604 - protein, 10 aa, Artificial Sequence
  Synthetic polymer.
GFTLDYYAIG

SEQ ID NO: 605 - protein, 9 aa, Artificial Sequence
  Synthetic polymer.
ISSSDGSTY

SEQ ID NO: 606 - protein, 8 aa, Artificial Sequence
  Synthetic polymer.
ITSDGFPT

SEQ ID NO: 607 - protein, 9 aa, Artificial Sequence
  Synthetic polymer.
IRWNGGSTN

SEQ ID NO: 608 - protein, 9 aa, Artificial Sequence
  Synthetic polymer.
ISSSDGSTY

SEQ ID NO: 609 - protein, 8 aa, Artificial Sequence
  Synthetic polymer.
ITSDGTPT

SEQ ID NO: 610 - protein, 9 aa, Artificial Sequence
  Synthetic polymer.
IDSGGGSTS

SEQ ID NO: 611 - protein, 8 aa, Artificial Sequence
  Synthetic polymer.
ITSGGITD

SEQ ID NO: 612 - protein, 8 aa, Artificial Sequence
  Synthetic polymer.
ITSDGTPT

SEQ ID NO: 613 - protein, 9 aa, Artificial Sequence
  Synthetic polymer.
IDSGGGSTS

SEQ ID NO: 614 - protein, 9 aa, Artificial Sequence
  Synthetic polymer.
IRSNGGYTN

SEQ ID NO: 615 - protein, 9 aa, Artificial Sequence
  Synthetic polymer.
ISSSDVGTY

SEQ ID NO: 616 - protein, 9 aa, Artificial Sequence
  Synthetic polymer.
INSSDGSTY

SEQ ID NO: 617 - protein, 9 aa, Artificial Sequence
  Synthetic polymer.
ISGSDSSTY

SEQ ID NO: 618 - protein, 9 aa, Artificial Sequence
  Synthetic polymer.
ISSSDVGTY

SEQ ID NO: 619 - protein, 8 aa, Artificial Sequence
  Synthetic polymer.
ITSDGTPT

SEQ ID NO: 620 - protein, 8 aa, Artificial Sequence
  Synthetic polymer.
ITSDGTPA

SEQ ID NO: 621 - protein, 9 aa, Artificial Sequence
  Synthetic polymer.
IDSGGGSTS

SEQ ID NO: 622 - protein, 9 aa, Artificial Sequence
  Synthetic polymer.
ISSGDGSKY

SEQ ID NO: 623 - protein, 9 aa, Artificial Sequence
  Synthetic polymer.
ISSSDVGTY

SEQ ID NO: 624 - protein, 8 aa, Artificial Sequence
  Synthetic polymer.
IFGGGFTN

SEQ ID NO: 625 - protein, 8 aa, Artificial Sequence
  Synthetic polymer.
ITSGGITD

SEQ ID NO: 626 - protein, 9 aa, Artificial Sequence
  Synthetic polymer.
ISSSDGSTY

SEQ ID NO: 627 - protein, 9 aa, Artificial Sequence
  Synthetic polymer.
IDSGGGSTS

SEQ ID NO: 628 - protein, 8 aa, Artificial Sequence
  Synthetic polymer.
ITSDGTPT

SEQ ID NO: 629 - protein, 9 aa, Artificial Sequence
  Synthetic polymer.
IDSGGGSTS

SEQ ID NO: 630 - protein, 9 aa, Artificial Sequence
  Synthetic polymer.
ISSSDVGTY

SEQ ID NO: 631 - protein, 9 aa, Artificial Sequence
  Synthetic polymer.
ITWSGGSTS

SEQ ID NO: 632 - protein, 9 aa, Artificial Sequence
  Synthetic polymer.
ISSSDGSTY

SEQ ID NO: 633 - protein, 9 aa, Artificial Sequence
  Synthetic polymer.
IDSGGGSTS

SEQ ID NO: 634 - protein, 9 aa, Artificial Sequence
  Synthetic polymer.
IRSNGGYTN

SEQ ID NO: 635 - protein, 9 aa, Artificial Sequence
  Synthetic polymer.
ISSSDGSTY

SEQ ID NO: 636 - protein, 16 aa, Artificial Sequence
  Synthetic polymer.
DGWSSCRHGINEYLYW

SEQ ID NO: 637 - protein, 8 aa, Artificial Sequence
  Synthetic polymer.
SSGVYNYW

SEQ ID NO: 638 - protein, 12 aa, Artificial Sequence
  Synthetic polymer.
QGYYCSGYGCPR

SEQ ID NO: 639 - protein, 17 aa, Artificial Sequence
  Synthetic polymer.
SGWRLCRPTDEYDYSYW

SEQ ID NO: 640 - protein, 8 aa, Artificial Sequence
  Synthetic polymer.
SSGVYNYW

SEQ ID NO: 641 - protein, 14 aa, Artificial Sequence
  Synthetic polymer.
QGYYCSGYGCSDYW

SEQ ID NO: 642 - protein, 7 aa, Artificial Sequence
  Synthetic polymer.
RDRTIWW

SEQ ID NO: 643 - protein, 8 aa, Artificial Sequence
  Synthetic polymer.
SSGVYNYW

SEQ ID NO: 644 - protein, 14 aa, Artificial Sequence
  Synthetic polymer.
QGYYCSGYGCSDYW

SEQ ID NO: 645 - protein, 12 aa, Artificial Sequence
  Synthetic polymer.
QGYYCSGYGCYP

SEQ ID NO: 646 - protein, 15 aa, Artificial Sequence
  Synthetic polymer.
DGYYYCSDYPHPLYW

SEQ ID NO: 647 - protein, 15 aa, Artificial Sequence
  Synthetic polymer.
DGWRDCTWSNEYAYW

SEQ ID NO: 648 - protein, 15 aa, Artificial Sequence
  Synthetic polymer.
TGWRTCRGLNEYDYW

SEQ ID NO: 649 - protein, 15 aa, Artificial Sequence
  Synthetic polymer.
DGYYYCSDYPHPLYW

SEQ ID NO: 650 - protein, 8 aa, Artificial Sequence
  Synthetic polymer.
SSGVYNYW

SEQ ID NO: 651 - protein, 8 aa, Artificial Sequence
  Synthetic polymer.
SSGVYNYW

SEQ ID NO: 652 - protein, 14 aa, Artificial Sequence
  Synthetic polymer.
QGYYCSGYGCSDYW

SEQ ID NO: 653 - protein, 15 aa, Artificial Sequence
  Synthetic polymer.
DGYYYCSDYPHPLYW

SEQ ID NO: 654 - protein, 15 aa, Artificial Sequence
  Synthetic polymer.
DGYYYCSDYPHPLYW

SEQ ID NO: 655 - protein, 13 aa, Artificial Sequence
  Synthetic polymer.
DLVSGSSRLYDYW

SEQ ID NO: 656 - protein, 7 aa, Artificial Sequence
  Synthetic polymer.
RDRTIWW

SEQ ID NO: 657 - protein, 16 aa, Artificial Sequence
  Synthetic polymer.
DGWSSCRHGINEYLYW

SEQ ID NO: 658 - protein, 14 aa, Artificial Sequence
  Synthetic polymer.
QGYYCSGYGCSDYW

SEQ ID NO: 659 - protein, 8 aa, Artificial Sequence
  Synthetic polymer.
SSGVYNYW

SEQ ID NO: 660 - protein, 14 aa, Artificial Sequence
  Synthetic polymer.
QGYYCSGYGCSDYW

SEQ ID NO: 661 - protein, 15 aa, Artificial Sequence
  Synthetic polymer.
DGYYYCSDYPHPLYW

SEQ ID NO: 662 - protein, 18 aa, Artificial Sequence
  Synthetic polymer.
MGRTNYGVIYDPNMYNYW

SEQ ID NO: 663 - protein, 17 aa, Artificial Sequence
  Synthetic polymer.
SGWRLCRPTDEYDYLYW

SEQ ID NO: 664 - protein, 14 aa, Artificial Sequence
  Synthetic polymer.
QGYYCSGYGCSDYW

SEQ ID NO: 665 - protein, 12 aa, Artificial Sequence
  Synthetic polymer.
QGYYCSGYGCYP

SEQ ID NO: 666 - protein, 16 aa, Artificial Sequence
  Synthetic polymer.
DGWSSCRHGINEYLYW

SEQ ID NO: 667 - protein, 143 aa, Artificial Sequence
  Synthetic polymer.
QVQLQESGGGLVQAGGSLRLSCAASGFTLDYYAIGWFRQAPGKEREEVSCISSSDGSTYYADSVKGRFTISRDNAKNTVNLQMNSLKPEDTAVYYCATDGWSSCRHGINEYLYWGQGTQVTVSSAAAYPYDVPDYGSHHHHHH

SEQ ID NO: 668 - protein, 134 aa, Artificial Sequence
  Synthetic polymer.
QVQLQESGGGLVQAGGSLRLSCTASGTIFSINHMDWFRQAPGKQRELVALITSDGFPTYADSAKGRFTISRDNTKKTVSLQMNSLKPEDTAVYYCHVSSGVYNYWGQGTQVTVSSAAAYPYDVPDYGSHHHHHH

SEQ ID NO: 669 - protein, 138 aa, Artificial Sequence
  Synthetic polymer.
QVQLQESGGGLVQPGGSLRLSCAASGFTFDDYGMSWVRQAPGKGLEWVSAIRWNGGSTNYADSVKGRFTISRDNAKNTLYLQMNSLKSEDTAVYYCAQGYYCSGYGCPRGQGTQVTVSSAAAYPYDVPDYGSHHHHHH

SEQ ID NO: 670 - protein, 144 aa, Artificial Sequence
  Synthetic polymer.
QVQLQESGGGLVQPGGSLRLSCAASGFTLDYYAINWFRQAPGKEREEVSCISSSDGSTYYADSVKGRFTISRDNAKNTVYLQMNSLKPEDTAVYYCATSGWRLCRPTDEYDYSYWGQGTQVTVSSAAAYPYDVPDYGSHHHHHH

SEQ ID NO: 671 - protein, 134 aa, Artificial Sequence
  Synthetic polymer.
QVQLQESGGGVVQAGGSLRLSCTASGTIFSINRMDWFRQAPGKQRELVALITSDGTPTYADSAKGRFTISRDNTKKTVSLQMNSLKPEDTAVYYCHVSSGVYNYWGQGTQVTVSSAAAYPYDVPDYGSHHHHHH

SEQ ID NO: 672 - protein, 140 aa, Artificial Sequence
  Synthetic polymer.
QVQLQESGGGLVQTGGSLRLSCAASGFTFSSYGMSWVRQTPGKGPEWVSAIDSGGGSTSYADSVKGRFTISRDNAKNTLYLQMNSLKPEDTAVYYCAQGYYCSGYGCSDYWGQGTQVTVSSAAAYPYDVPDYGSHHHHHH

SEQ ID NO: 673 - protein, 133 aa, Artificial Sequence
  Synthetic polymer.
QVQLQESGGGLVQPGGSLRLSCAASGKIFSGNDMGWYRQAPGKQRELVGIITSGGITDYADAVKGRFTISRDNAKNMMYLQMNSLKPEDTAVYYCNMRDRTIWWGQGTQVTVSSAAAYPYDVPDYGSHHHHHH

SEQ ID NO: 674 - protein, 134 aa, Artificial Sequence
  Synthetic polymer.
QVQLQESGGGSVQAGGSLRLSCTASGTIFSINRMDWFRQAPGKQRELVALITSDGTPTYADSAKGRFTISRDNTKKTVSLQMNSLKPEDTAVYYCHVSSGVYNYWGQGTQVTVSSAAAYPYDVPDYGSHHHHHH

SEQ ID NO: 675 - protein, 140 aa, Artificial Sequence
  Synthetic polymer.
QVQLQESGGGLVQPGGSLRLSCAASGFTFSSYGMSWVRQTPGKGPEWVSAIDSGGGSTSYADSVKGRFTTSRDNAKNTLYLQMNSLKPEDTAVYYCAQGYYCSGYGCSDYWGQGTQVTVSSAAAYPYDVPDYGSHHHHHH

SEQ ID NO: 676 - protein, 138 aa, Artificial Sequence
  Synthetic polymer.
QVQLQESGGGLVQPGGSLRLSCAASGFTFNDYAMSWVRQAPGKGLEWVSGIRSNGGYTNYADSVKGRFTISRDNAKNTLYLQMNSLKSEDTAVYYCAQGYYCSGYGCYPGQGTQVTVSSAAAYPYDVPDYGSHHHHHH

SEQ ID NO: 677 - protein, 142 aa, Artificial Sequence
  Synthetic polymer.
QVQLQESGGGLVQAGGSLRLSCAASGFNLDPYAIAWFRQAPGKEREEVSCISSSDVGTYYADSVKGRFTISRDNAKKTVYLQMNSLKPEDTAVYYCATDGYYYCSDYPHPLYWGQGTQVTVSSAAAYPYDVPDYGSHHHHHH

SEQ ID NO: 678 - protein, 142 aa, Artificial Sequence
  Synthetic polymer.
QVQLQESGGGLVQPGGSLRLSCAASGFTFTAYAMSWFRQAPGKEREEVSCINSSDGSTYYADSVKGRFTISRDNAKNTVYLQMNSLKPEDTAVYHCATDGWRDCTWSNEYAYWGQGTQVTVSSAAAYPYDVPDYGSHHHHHH

SEQ ID NO: 679 - protein, 142 aa, Artificial Sequence
  Synthetic polymer.
QVQLQESGGGLVQPGGSLRLSCAASGFTFDYYAIGWFRQAPGKEREEVSCISGSDSSTYYADSVKGRFTIVRDNAQNTVYLQMNSLKPEDTAIYYCAVTGWRTCRGLNEYDYWGQGTQVTVSSAAAYPYDVPDYGSHHHHHH

SEQ ID NO: 680 - protein, 142 aa, Artificial Sequence
  Synthetic polymer.
QVQLQESGGGLVQPGGSLRLSCAASGFNLDPYAIAWFRQAPGKEREEVSCISSSDVGTYYADSVKGRFTISRDNTKKTVYLQMNSLKPEDTAVYYCATDGYYYCSDYPHPLYWGQGTQVTVSSAAAYPYDVPDYGSHHHHHH

SEQ ID NO: 681 - protein, 134 aa, Artificial Sequence
  Synthetic polymer.
QVQLQESGGGLVQAGESLRLSCTASGTIFSINRMDWFRQAPGKQRELVALITSDGTPTYADSAKGRFTISRDNTKKTVSLQMNSLKPEDTAVYYCHVSSGVYNYWGQGTQVTVSSAAAYPYDVPDYGSHHHHHH

SEQ ID NO: 682 - protein, 134 aa, Artificial Sequence
  Synthetic polymer.
QVQLQESGGGLVQAGGSLRLSCTASGTIFSINRMDWFRQAPGKQRELVALITSDGTPAYADSAKGRFTISRDNTKKTVSLQMNSLKPEDTAVYYCHVSSGVYNYWGQGTQVTVSSAAAYPYDVPDYGSHHHHHH

SEQ ID NO: 683 - protein, 140 aa, Artificial Sequence
  Synthetic polymer.
QVQLQESGGGLVQSGGSLRLSCKTSGFTFSSYGMSWVRQTPGKGPEWVSAIDSGGGSTSYADSVKGRFTISRDNAKNTLYLQMNSLKPEDTAVYYCAQGYYCSGYGCSDYWGQGTQVTVSSAAAYPYDVPDYGSHHHHHH

SEQ ID NO: 684 - protein, 142 aa, Artificial Sequence
  Synthetic polymer.
QVQLQESGGGLVQPGGSLRLSCAASGFNLDPYAIGWFRQAPGKEREEVSCISSGDGSKYYADSVKGRFTMSRDNAKKTVYLQMNSLKPEDTAVYYCATDGYYYCSDYPHPLYWGQGTQVTVSSAAAYPYDVPDYGSHHHHHH

SEQ ID NO: 685 - protein, 142 aa, Artificial Sequence
  Synthetic polymer.
QVQLQESGGGLVQPGGSLRLSCAVSGFNLDPYAIAWFRQAPGKEREEVSCISSSDVGTYYADSVKGRFTISRDNAKKTVYLQMNSLKPEDTAVYYCATDGYYYCSDYPHPLYWGQGTQVTVSSAAAYPYDVPDYGSHHHHHH

SEQ ID NO: 686 - protein, 139 aa, Artificial Sequence
  Synthetic polymer.
QVQLQESGGGLVQAGGSLRLSCAASESIFSIEAMGWYRQAPGKQRELVAAIFGGGFTNYADSVKGRFTISRDNANRTVYLQMNSLKPEDTAVYYCNADLVSGSSRLYDYWGQGTQVTVSSAAAYPYDVPDYGSHHHHHH

SEQ ID NO: 687 - protein, 133 aa, Artificial Sequence
  Synthetic polymer.
QVQLQESGGGLVQAGGSLRLSCAASGKIFSGNDMGWYRQAPGKQRELVGIITSGGITDYADAVKGRFTISRDNAKNMMYLQMNSLKPEDTAVYYCNMRDRTIWWGQGTQVTVSSAAAYPYDVPDYGSHHHHHH

SEQ ID NO: 688 - protein, 143 aa, Artificial Sequence
  Synthetic polymer.
QVQLQESGGGLVQPGGSLRLSCAASGFTLDYYAIGWFRQAPGKEREEVSCISSSDGSTYYADSVKGRFTISRDNAKNTVNLQMNSLKPEDTAVYYCATDGWSSCRHGINEYLYWGQGTQVTVSSAAAYPYDVPDYGSHHHHHH

SEQ ID NO: 689 - protein, 140 aa, Artificial Sequence
  Synthetic polymer.
QVQLQESGGGLVQAGGSLRLSCAASGFTFSSYGMSWVRQTPGKGPEWVSAIDSGGGSTSYADSVKGRFTISRDNAKNTLYLQMNSLKPEDTAVYYCAQGYYCSGYGCSDYWGQGTQVTVSSAAAYPYDVPDYGSHHHHHH

SEQ ID NO: 690 - protein, 134 aa, Artificial Sequence
  Synthetic polymer.
QVQLQESGGGLVQPGGSLRLSCTASGTIFSINRMDWFRQAPGKQRELVALITSDGTPTYADSAKGRFTISRDNTKKTVSLQMNSLKPEDTAVYYCHVSSGVYNYWGQGTQVTVSSAAAYPYDVPDYGSHHHHHH

SEQ ID NO: 691 - protein, 140 aa, Artificial Sequence
  Synthetic polymer.
QVQLQESGGGLVQPGGSLRLSCAASGFTFSSYGMSWVRQTPGKGPEWVSAIDSGGGSTSYADSVKGRFTISRDNAKNTLYLQMNSLKPEDTAVYYCAQGYYCSGYGCSDYWGQGTQVTVSSAAAYPYDVPDYGSHHHHHH

SEQ ID NO: 692 - protein, 142 aa, Artificial Sequence
  Synthetic polymer.
QVQLQESGGGLVQPGGSLRLSCAASGFNLDPYAIAWFRQAPGKEREEVSCISSSDVGTYYADSVKGRFTISRDNAKKTVYLQMNSLKPEDTAVYYCATDGYYYCSDYPHPLYWGQGTQVTVSSAAAYPYDVPDYGSHHHHHH

SEQ ID NO: 693 - protein, 145 aa, Artificial Sequence
  Synthetic polymer.
  misc_feature (13)..(13): Xaa can be any naturally occurring amino acid
QVQLQESGGGLVXAGGSLRLSCAASGRTFSISAMGWFRQAPGKEREFVAAITWSGGSTSYTDSVKGRFTISRDNAKNTLYLQMNSLKPEDTAIYYCAAMGRTNYGVIYDPNMYNYWGQGTQVTVSSAAAYPYDVPDYGSHHHHHH

SEQ ID NO: 694 - protein, 144 aa, Artificial Sequence
  Synthetic polymer.
QVQLQESGGGLVQPGGSLRLSCAASGFTLDYYAINWFRQAPGKEREEVSCISSSDGSTYYADSVKGRFTISRDNAKNTVYLQMNSLKPEDTAVYYCATSGWRLCRPTDEYDYLYWGQGTQVTVSSAAAYPYDVPDYGSHHHHHH

SEQ ID NO: 695 - protein, 140 aa, Artificial Sequence
  Synthetic polymer.
QVQLQESGGGLVQAGGSMRLSCAASGFTFSSYGMSWVRQTPGKGPEWVSAIDSGGGSTSYADSVKGRFTISRDNAKNTLYLQMNSLKPEDTAVYYCAQGYYCSGYGCSDYWGQGTQVTVSSAAAYPYDVPDYGSHHHHHH

SEQ ID NO: 696 - protein, 138 aa, Artificial Sequence
  Synthetic polymer.
QVQLQESGGGTVQAGGSLRLSCAASGFTFNDYAMSWVRQAPGKGLEWVSGIRSNGGYTNYADSVKGRFTISRDNAKNTLYLQMNSLKSEDTAVYYCAQGYYCSGYGCYPGQGTQVTVSSAAAYPYDVPDYGSHHHHHH

SEQ ID NO: 697 - protein, 143 aa, Artificial Sequence
  Synthetic polymer.
QVQLQESGGGLVQPGTSLRLSCAASGFTLDYYAIGWFRQAPGKEREEVSCISSSDGSTYYADSVKGRFTISRDNAKNTVNLQMNSLKPEDTAVYYCATDGWSSCRHGINEYLYWGQGTQVTVSSAAAYPYDVPDYGSHHHHHH

SEQ ID NO: 698 - protein, 451 aa, Artificial Sequence
  Synthetic polymer.
EVQLVESGGGIKQDGSEKYYGWFGELAFDYKDYFPEPVTVTYICNVNHKPPKDTLMISRTNSTYRVVSVLQVYTLPPSREVLDSDGSFFLLVQPGGSLRLVDSVKGRFTIWGQGTLVTVSSWNSGALTSGSNTKVDKRVEPEVTCVVVDVTVLHQDWLNGEMTKNQVSLTYSKLTVDKSRSCAASGFTFSSRDNAKNSLYSASTKGPSVFVHTFPAVLQSPKSCDKTHTCSHEDPEVKFNKEYKCKVSNKCLVKGFYPSDWQQGNVFSCSRYWMSWVRQALQMNSLRAEDPLAPSSKSTSSGLYSLSSVVPPCPAPEFEGWYVDGVEVHNALPASIEKTIIAVEWESNGQVMHEALHNHYPGKGLEWVANTAVYYCAREGGGTAALGCLVTVPSSSLGTQGPSVFLFPPKAKTKPREEQYSKAKGQPREPPENNYKTTPPTQKSLSLSPGK

SEQ ID NO: 699 - protein, 215 aa, Artificial Sequence
  Synthetic polymer.
EIVLTQSPGTLSLSPGERATLSCRASQRVSSSYLAWYQQKPGQAPRLLIYDASSRATGIPDRFSGSGSGTDFTLTISRLEPEDFAVYYCQQYGSLPWTFGQGTKVEIKRTVAAPSVFIFPPSDEQLKSGTASVVCLLNNFYPREAKVQWKVDNALQSGNSQESVTEQDSKDSTYSLSSTLTLSKADYEKHKVYACEVTHQGLSSPVTKSFNRGEC

SEQ ID NO: 700 - protein, 118 aa, Artificial Sequence
  Synthetic polymer.
EVKLQESGPSLVKPSQTLSLTCSVTGYSIISDYWNWIRKFPGNKLEYLGYISYTGSTYYNPSLKSRISITRDTSKNQYYLQLNSVTTEDTATYYCARRGGWLLPFDYWGQGTTLTVSS

SEQ ID NO: 701 - protein, 113 aa, Artificial Sequence
  Synthetic polymer.
DIVMTQSPSSLAVSVGEKVSMGCKSSQSLLYSSNQKNSLAWYQQKPGQSPKLLIDWASTRESGVPDRFTGSGSGTDFTLTISSVKAEDLAVYYCQQYYGYPLTFGAGTKLELK

SEQ ID NO: 702 - protein, 118 aa, Artificial Sequence
  Synthetic polymer.
EVKLQESGPSLVKPGASVKLSCKASGYTFTSYDINWVKQRPGQGLEWIGWIFPRDNNTKYNENFKGKATLTVDTSSTTAYMELHSLTSEDSAVYFCTKENWVGDFDYWGQGTTLTLSS

SEQ ID NO: 703 - protein, 106 aa, Artificial Sequence
  Synthetic polymer.
DIVMTQSPAIMSASPGEKVTMTCSASSSIRYMHWYQQKPGTSPKRWISDTSKLTSGVPARFSGSGSGTSYALTISSMEAEDAATYYCHQRSSYPWTFGGGTKLEIK

SEQ ID NO: 704 - protein, 114 aa, Artificial Sequence
  Synthetic polymer.
EVQLQQSGPDLVTPGASVRISCQASGYTFPDYYMNWVKQSHGKSLEWIGDIDPNYGGTTYNQKFKGKAILTVDRSSSTAYMELRSLTSEDSAVYYCARGALTDWGQGTSLTVSS

SEQ ID NO: 705 - protein, 106 aa, Artificial Sequence
  Synthetic polymer.
QIVLSQSPAILSASPGEKVTMTCRASSSVSYIYWFQQKPGSSPKPWIYATFNLASGVPARFSGSGSGTSYSLTISRVETEDAATYYCQQWSNNPLTFGAGTKLELK

SEQ ID NO: 706 - protein, 115 aa, Artificial Sequence
  Synthetic polymer.
EVQLVQSGPELKKPGASVKMSCKASGYTFTSYVMHWVKQAPGQRLEWIGYVNPFNDGTKYNEMFKGRATLTSDKSTSTAYMELSSLRSEDSAVYYCARQAWGYPWGQGTLVTVSS

SEQ ID NO: 707 - protein, 115 aa, Artificial Sequence
  Synthetic polymer.
EVQLVQSGAEVKKPGASVKMSCKASGYTFTSYVMHWVKQAPGQRLEWIGYVNPFNDGTKYNEMFKGRATLTSDKSTSTAYMELSSLRSEDTAVYYCARQAWGYPWGQGTLVTVSS

SEQ ID NO: 708 - protein, 115 aa, Artificial Sequence
  Synthetic polymer.
EVQLVQSGAEVKKPGASVKMSCKASGYTFTSYVMHWVRQAPGQRLEWIGYVNPFNDGTKYNEMFKGRATLTSDKSTSTAYMELSSLRSEDTAVYYCARQAWGYPWGQGTLVTVSS

SEQ ID NO: 709 - protein, 115 aa, Artificial Sequence
  Synthetic polymer.
EVQLVQSGAEVKKPGASVKVSCKASGYTFTSYVMHWVRQAPGQRLEWIGYVNPFNDGTKYNEMFKGRATLTSDKSTSTAYMELSSLRSEDTAVYYCARQAWGYPWGQGTLVTVSS

SEQ ID NO: 710 - protein, 115 aa, Artificial Sequence
  Synthetic polymer.
EVQLVQSGAEVKKPGASVKVSCKASGYTFTSYVMHWVRQAPGQRLEWIGYVNPFNDGTKYNEMFKGRATITSDKSTSTAYMELSSLRSEDTAVYYCARQAWGYPWGQGTLVTVSS

SEQ ID NO: 711 - protein, 111 aa, Artificial Sequence
  Synthetic polymer.
DIVLTQSPASLALSPGERATLSCRATESVEYYGTSLVQWYQQKPGQPPKLLIYAASSVDSGVPSRFSGSGSGTDFTLTINSLEEEDAAMYFCQQSRRVPYTFGQGTKLEIK

SEQ ID NO: 712 - protein, 111 aa, Artificial Sequence
  Synthetic polymer.
DIVLTQSPATLSLSPGERATLSCRATESVEYYGTSLVQWYQQKPGQPPKLLIYAASSVDSGVPSRFSGSGSGTDFTLTINSLEAEDAAMYFCQQSRRVPYTFGQGTKLEIK

SEQ ID NO: 713 - protein, 111 aa, Artificial Sequence
  Synthetic polymer.
EIVLTQSPATLSLSPGERATLSCRATESVEYYGTSLVQWYQQKPGQPPKLLIYAASSVDSGVPSRFSGSGSGTDFTLTINSLEAEDAAMYFCQQSRRVPYTFGQGTKLEIK

SEQ ID NO: 714 - protein, 111 aa, Artificial Sequence
  Synthetic polymer.
DIVLTQSPATLSLSPGERATLSCRATESVEYYGTSLVQWYQQKPGQPPKLLIYAASSVDSGVPSRFSGSGSGTDFTLTINSLEAEDAATYFCQQSRRVPYTFGQGTKLEIK

SEQ ID NO: 715 - protein, 120 aa, Artificial Sequence
  Synthetic polymer.
EVQLVESGGGLVKPGGSLRLSCAASGFTFSTYSMNWVRQAPGKGLEWVSSISSSGDYIYYADSVKGRFTISRDNAKNSLFLQMNSLKAEDTAVYYCARDLVTSMVAFDYWGQGTLVTVSS

SEQ ID NO: 716 - protein, 108 aa, Artificial Sequence
  Synthetic polymer.
SYELTQPPSVSVSPGQAARITCSGDALPQKYVFWYQQKSGQAPVLVIYEDSKRPSGIPERFSGSSSGTMATLTISGAQVEDEADYYCYSTDRSGNHRVFGGGTRLTVL

SEQ ID NO: 717 - protein, 120 aa, Artificial Sequence
  Synthetic polymer.
EVQLVESGGGLVQPGGSLRLSCAASGFTFSSYWMSWVRQAPGKGLEWVANIKQDGGEQYYVDSVKGRFTISRDNAKNSLYLQMNSLRAEDTAVYYCARDWNYGYYDMDVWGQGTTVTVSS

SEQ ID NO: 718 - protein, 108 aa, Artificial Sequence
  Synthetic polymer.
EIVLTQSPGTLSLSPGERATLSCRASQSVSSNYLAWFQQKPGQAPRLLIFGTSSRATGIPDRFSGSGSGTDFTLTISRLEPEDFAVYYCQQYGSSIFTFGPGTKVDIK

SEQ ID NO: 719 - protein, 121 aa, Artificial Sequence
  Synthetic polymer.
EVQLVESGGGLVQPGGSLRLSCAASGFTFSRYWMSWVRQAPGKGLEWVANIKQDGSEKYYVDSVKGRFTISRDNAKNSLYLQMNSLRAEDTAVYYCAREGGWFGELAFDYWGQGTLVTVSS

SEQ ID NO: 720 - protein, 108 aa, Artificial Sequence
  Synthetic polymer.
EIVLTQSPGTLSLSPGERATLSCRASQRVSSSYLAWYQQKPGQAPRLLIYDASSRATGIPDRFSGSGSGTDFTLTISRLEPEDFAVYYCQQYGSLPWTFGQGTEVEIK

SEQ ID NO: 721 - protein, 121 aa, Artificial Sequence
  Synthetic polymer.
EVQLLESGGGLVQPGGSLRLSCAASGFTFSNYAMSWVRQAPGKGLEWVSAIRGSGGSTYYADSVKGRFTISRDNSKNTLYLQMNSLRAEDTAVYYCAKDLHYDSSGYLDYWGQGTLVTVSS

SEQ ID NO: 722 - protein, 107 aa, Artificial Sequence
  Synthetic polymer.
DIQMTQSPSSVSASVGDRVTITCRASQGIRSWLAWYQQKPGKAPKLLIYAISRLQSGVPSRFSGSGSGTDFTLTISSLQPEDFATYYCQQANSFPLTFGGGTKVEIK

SEQ ID NO: 723 - protein, 119 aa, Artificial Sequence
  Synthetic polymer.
EVQLVESGGGLVQPGGSLRLSCAASGFTFSSYWMSWVRQAPGKGLEWVANIKQDGGEKYYVDSVKGRFTISRDNAKNSLFLQMNSLRAEDTAVYYCARVQLYSDYFDYWGQGTLVTVSS

SEQ ID NO: 724 - protein, 107 aa, Artificial Sequence
  Synthetic polymer.
DIQMTQSPSSVSASVGDRVTITCRASQGISSWLAWYQQKSGKAPKLLIYAASGLQSGVPSRFSGSGSGTDFTLTISSLQPEDLATYYCQQSHSLPPTFGQGTKVEIK

SEQ ID NO: 725 - protein, 121 aa, Artificial Sequence
  Synthetic polymer.
EVQLLESGGDLVQPGGSLRLSCAASGFTFNSYAMSWVRQAPGKGLEWVSTISGSGGFTFSADSVKGRFTISRDNSKNTLFLQMNSLRVEDSAVYSCAKVLVGFNNGCWDYWGQGTLVTVSS

SEQ ID NO: 726 - protein, 108 aa, Artificial Sequence
  Synthetic polymer.
SYVLTQPPSVSVAPGQTARITCGGNNIGSKSVHWYQQKPGQAPVLVVYDDSDRPSGIPERFSGSNSGNTATLTISRVEAGDEADYYCQVWDSSNDHVVFGGGTKLTVL

SEQ ID NO: 727 - protein, 120 aa, Artificial Sequence
  Synthetic polymer.
EVQLVESGGGLVKPGGSLRLSCAASGFTFSTYSMNWVRQAPGKGLEWVSSISSSGDYIYYADSVKGRFTISRDNAKNSLYLQMNSLRAEDTAVYYCARDLVTSMVAFDYWGQGTLVTVSS

SEQ ID NO: 728 - protein, 108 aa, Artificial Sequence
  Synthetic polymer.
SYELTQPPSVSVSPGQTARITCSGDALPQKYVFWYQQKSGQAPVLVIYEDSKRPSGIPERFSGSSSGTMATLTISGAQVEDEADYYCYSTDRSGNHRVFGGGTKLTVL

SEQ ID NO: 729 - protein, 121 aa, Artificial Sequence; identical to SEQ ID NO: 719
  Synthetic polymer.

SEQ ID NO: 730 - protein, 108 aa, Artificial Sequence
  Synthetic polymer.
EIVLTQSPGTLSLSPGERATLSCRASQRVSSSYLAWYQQKPGQAPRLLIYDASSRATGIPDRFSGSGSGTDFTLTISRLEPEDFAVYYCQQYGSLPWTFGQGTKVEIK

SEQ ID NO: 731 - protein, 120 aa, Artificial Sequence
  Synthetic polymer.
QVQLVQSGAEVKKPGASVKVSCKASGYTFTSYWMYWVRQATGQGLEWMGRIDPNSGSTKYNEKFKNRFTISRDDSKNTAYLQMNSLKTEDTAVYYCARDYRKGLYAMDYWGQGTTVTVSS

SEQ ID NO: 732 - protein, 120 aa, Artificial Sequence
  Synthetic polymer.
EVQLVQSGAEVKKPGATVKISCKVSGYTFTSYWMYWVRQATGQGLEWMGRIDPNSGSTKYNEKFKNRVTITADKSTSTAYMELSSLRSEDTAVYYCARDYRKGLYAMDYWGQGTTVTVSS

SEQ ID NO: 733 - protein, 120 aa, Artificial Sequence
  Synthetic polymer.
EVQLVQSGAEVKKPGESLRISCKGSGYTFTSYWMYWVRQAPGQGLEWMGRIDPNSGSTKYNEKFKNRVTISVDTSKNQFSLKLSSVTAADTAVYYCARDYRKGLYAMDYWGQGTTVTVSS

SEQ ID NO: 734 - protein, 120 aa, Artificial Sequence
  Synthetic polymer.
EVQLVQSGAEVKKPGATVKISCKVSGYTFTSYWMYWIRQSPSRGLEWLGRIDPNSGSTKYNEKFKNRLTISKDTSKNQVVLTMTNMDPVDTATYYCARDYRKGLYAMDYWGQGTTVTVSS

SEQ ID NO: 735 - protein, 120 aa, Artificial Sequence
  Synthetic polymer.
EVQLVQSGAEVKKPGESLRISCKGSGYTFTSYWMYWIRQPPGKGLEWIGRIDPNSGSTKYNEKFKNRVTITADKSTSTAYMELSSLRSEDTAVYYCARDYRKGLYAMDYWGQGTTVTVSS

SEQ ID NO: 736 - protein, 120 aa, Artificial Sequence
  Synthetic polymer.
QVQLVQSGAEVKKPGASVKVSCKASGYTFTSYWMYWIRQSPSRGLEWLGRIDPNSGSTKYNEKFKNRFTISRDDSKNTAYLQMNSLKTEDTAVYYCARDYRKGLYAMDYWGQGTTVTVSS

SEQ ID NO: 737 - protein, 120 aa, Artificial Sequence
  Synthetic polymer.
EVQLVQSGAEVKKPGESLRISCKGSGYTFTSYWMYWVRQARGQRLEWIGRIDPNSGSTKYNEKFKNRLTISKDTSKNQVVLTMTNMDPVDTATYYCARDYRKGLYAMDYWGQGTTVTVSS

SEQ ID NO: 738 - protein, 120 aa, Artificial Sequence
  Synthetic polymer.
QITLKESGPTLVKPTQTLTLTCTFSGYTFTSYWMYWVRQAPGKGLEWVSRIDPNSGSTKYNEKFKNRVTITADKSTSTAYMELSSLRSEDTAVYYCARDYRKGLYAMDYWGQGTTVTVSS

SEQ ID NO: 739 - protein, 120 aa, Artificial Sequence
  Synthetic polymer.
EVQLVQSGAEVKKPGATVKISCKVSGYTFTSYWMYWVRQARGQRLEWIGRIDPNSGSTKYNEKFKNRFTISRDNSKNTLYLQMNSLRAEDTAVYYCARDYRKGLYAMDYWGQGTTVTVSS

SEQ ID NO: 740 - protein, 107 aa, Artificial Sequence
  Synthetic polymer.
DIVMTQTPLSLPVTPGEPASISCKASQDVGTAVAWYLQKPGQSPQLLIYWASTRHTGIPARFSGSGSGTEFTLTISSLQSEDFAVYYCQQYNSYPLTFGQGTKVEIK

SEQ ID NO: 741 - protein, 107 aa, Artificial Sequence
  Synthetic polymer.
DIQMTQSPSSLSASVGDRVTITCKASQDVGTAVAWYLQKPGQSPQLLIYWASTRHTGVPSRFSGSGSGTDFTLTISSLQPEDFATYYCQQYNSYPLTFGQGTKVEIK

SEQ ID NO: 742 - protein, 107 aa, Artificial Sequence
  Synthetic polymer.
EIVLTQSPDFQSVTPKEKVTITCKASQDVGTAVAWYLQKPGQSPQLLIYWASTRHTGVPDRFSGSGSGTDFTLKISRVEAEDVGVYYCQQYNSYPLTFGQGTKVEIK

SEQ ID NO: 743 - protein, 107 aa, Artificial Sequence
  Synthetic polymer.
EIVLTQSPDFQSVTPKEKVTITCKASQDVGTAVAWYLQKPGQSPQLLIYWASTRHTGVPSRFSGSGSGTDFTFTISSLQPEDIATYYCQQYNSYPLTFGQGTKVEIK

SEQ ID NO: 744 - protein, 107 aa, Artificial Sequence
  Synthetic polymer.
EIVLTQSPATLSLSPGERATLSCKASQDVGTAVAWYLQKPGQSPQLLIYWASTRHTGIPPRFSGSGYGTDFTLTINNIESEDAAYYFCQQYNSYPLTFGQGTKVEIK

SEQ ID NO: 745 - protein, 107 aa, Artificial Sequence
  Synthetic polymer.
DVVMTQSPLSLPVTLGQPASISCKASQDVGTAVAWYQQKPGQAPRLLIYWASTRHTGVPSRFSGSGSGTEFTLTISSLQPDDFATYYCQQYNSYPLTFGQGTKVEIK

SEQ ID NO: 746 - protein, 107 aa, Artificial Sequence
  Synthetic polymer.
DIQMTQSPSSLSASVGDRVTITCKASQDVGTAVAWYQQKPGQAPRLLIYWASTRHTGVPSRFSGSGSGTDFTFTISSLQPEDIATYYCQQYNSYPLTFGQGTKVEIK

SEQ ID NO: 747 - protein, 107 aa, Artificial Sequence
  Synthetic polymer.
AIQLTQSPSSLSASVGDRVTITCKASQDVGTAVAWYLQKPGQSPQLLIYWASTRHTGVPSRFSGSGSGTDFTFTISSLEAEDAATYYCQQYNSYPLTFGQGTKVEIK

SEQ ID NO: 748 - protein, 107 aa, Artificial Sequence
  Synthetic polymer.
EIVLTQSPDFQSVTPKEKVTITCKASQDVGTAVAWYQQKPGQAPRLLIYWASTRHTGVPSRFSGSGSGTEFTLTISSLQPDDFATYYCQQYNSYPLTFGQGTKVEIK

SEQ ID NO: 749 - protein, 116 aa, Artificial Sequence
  Synthetic polymer.
EVKLVESGGGLVKPGGSLKLSCAASGFIFRSYGMSWVRQTPEKRLEWVASISSGGSTYYPDSVKGRFTISRDNARNILYLQMSSLRSEDTAMYDCARGYDSGFAYWGQGTLVTVSE

SEQ ID NO: 750 - protein, 116 aa, Artificial Sequence
  Synthetic polymer.
EVKLVESGGGLVKPGGSLKLSCAASGFTFRSYGMSWVRQTPEKRLEWVASISSGGTTYYPDSVKGRFIISRDNARNILYLQMSSLRSEDTAMYYCAKGYDSGFAYWGQGTLVIVSA

SEQ ID NO: 751 - protein, 116 aa, Artificial Sequence
  Synthetic polymer.
QVQLKQSGPGLVQPSQSLSITCTVSGFSLTTYGVHWVRQSPGKGLEWLGVIWRGVTTDYNAAFMSRLTITKDNSKSQVFFKMNSLQANDTAIYYCARLGFYAMDYWGQGTSVTVSS

SEQ ID NO: 752 - protein, 116 aa, Artificial Sequence
  Synthetic polymer.
QVQLKQSGPGLVQPSQSLSITCTVSGFSLTSYGVHWVRQSPGKGLEWLGVIWSGGVTDYNAAFISRLSISKDNSKSQVFFKMNSLQANDTAIYYCARLGFYAMDYWGQGTSVTVSS

SEQ ID NO: 753 - protein, 119 aa, Artificial Sequence
  Synthetic polymer.
EVKLFESGGGLVQPGGSLKLSCVASGFDFSTYWMHWVRQAPGQGLEWIGQINPDSTTINYAPSLKDRFIISRDNAKNTLFLQMSKVRSEDTALYYCAKPGDYGYDFDCWGQGTTLTVSS

SEQ ID NO: 754 - protein, 119 aa, Artificial Sequence
  Synthetic polymer.
EVQLQESGPSLVKPSQTLSLTCSVTGDSITSGYWNWIRKFPGNKLEYMGYISYSGSTYYNPSLKSRISITRDTSKNQYYLQLNSVTTEDTATYYCARSLLWFSTGFAYWGQGTLVTVSA

SEQ ID NO: 755 - protein, 116 aa, Artificial Sequence
  Synthetic polymer.
QVQLKQSGPGLVQPSQSLSITCTVSGFSLTSYGVHWVRQSPGKGLEWLGVIWSGGITDYNAAFKSRLSISKDNSKSQVFFKMNSLQANDTAIYFCARLGFYAMDYWGQGTSVTVSS

SEQ ID NO: 756 - protein, 116 aa, Artificial Sequence
  Synthetic polymer.
EVKLVESGGGLVKPGGSLKLSCAASGFTFRSYGMSWARQIPEKRLEWVASISSGGTTYYLGSVQGRFTISRDNARNILYLQMSSLRSEDTAMYYCARGYDAGFAYWGQGTLVSVSE

SEQ ID NO: 757 - protein, 117 aa, Artificial Sequence
  Synthetic polymer.
EVQLQESGPSLVKPSQTLSLTCSVTGDSITSGYWTWIRKFPGNKLEYMGYISYTGSTYYNPSLKSRISISRDTSKSQYYLQLNSVTTEDTATYYCARQRDWLGFAYWGQGTLVTVSA

SEQ ID NO: 758 - protein, 116 aa, Artificial Sequence
  Synthetic polymer.
EEKLVESGGGLVKPGGSLKLSCAASGFSFSSYGMSWVRQTPEKRLEWVASISSGGSIYYPDSVKGRFTISRDNARNILYLQMSSLRSEDTAMYYCARGYDAGFAFWGQGTLVTASA

SEQ ID NO: 759 - protein, 116 aa, Artificial Sequence
  Synthetic polymer.
QITLKESGPTLVKPTQTLTLTCTVSGFSLSTYGVHWIRQPPGKALEWLGVIWRGVTTDYNAAFMSRLTITKDNSKNQVVLTMNNMDPVDTATYYCARLGFYAMDYWGQGTLVTVSS

SEQ ID NO: 760 - protein, 116 aa, Artificial Sequence
  Synthetic polymer.
EVQLVESGGGLVKPGGSLRLSCAASGFIFRSYGMSWVRQAPGKGLEWVASISSGGSTYYPDSVKGRFTISRDNAKNSLYLQMNSLRAEDTAVYDCARGYDSGFAYWGQGTLVTVSS

SEQ ID NO: 761 - protein, 112 aa, Artificial Sequence
  Synthetic polymer.
DIVLTQSPASLAVSLGQRATISCRASQSVSTSSSSFMHWYQQKPGQPPKLLIKYASNLESGVPARFSGSGSGTDFTLNIHPVEEEDTATYYCQHSWEIPYTFGGGTKLEIKR

SEQ ID NO: 762 - protein, 111 aa, Artificial Sequence
  Synthetic polymer.
DIVLTQSPPSLAVSLGQRATISCRASQSVSTSSSSYMHWYQQKPGQPPKLLIKYASNLESGVPARFSGSGSGTDFTLNIHPVEEEDTATYYCQHSWEIPYTFGGGTKLEIK

SEQ ID NO: 763 - protein, 107 aa, Artificial Sequence
  Synthetic polymer.
SIVMTQTPKFLLVSAGDRVTITCKASQSVSNDVAWYQQKPGQSPKLLIYYAANRYTGVPDRFTGSGYGTDFTFTISIVQAEDLAVYFCQQDYTSPYTFGGGTKLEIK

SEQ ID NO: 764 - protein, 107 aa, Artificial Sequence
  Synthetic polymer.
SIVMTQTPKFLLVSAGDRVTITCKASQSVSNDVGWYQQKPGQSPKLLIYYASNRYSGVPDRFTGSGYGTDFTFTISTVQAEDLAVYFCQQDYTSPYTFGGGTKLEIK

SEQ ID NO: 765 - protein, 112 aa, Artificial Sequence
  Synthetic polymer.
DVLMTQTPLYLPVSLGDQASISCRSSQIIVHSNANTYLEWFLQKPGQSPKLLIYKVSNRFSGVPDRFSGSGSGTDFTLKISRVEAEDLGVYYCFQGSHVPYTFGGGTKLEIK

SEQ ID NO: 766 - protein, 108 aa, Artificial Sequence
  Synthetic polymer.
QIVLTQSPAIMSASPGEKVTLTCSASSSVSSSYLYWNQQKPGSSPKVWIYNTSNLASGVPARFSGSGSGTSYSLTISSMEAEDAASYFCHQWRSYPPTLGAGTKLELK

SEQ ID NO: 767 - protein, 106 aa, Artificial Sequence
  Synthetic polymer.
QIVLTQSPAIMSASPGEKVTMTCSANSSVSYMHWYQQKSGTSPKRWIYDTSKLASGVPARFSGSGSGTSYSLTISSMGAEDAATYYCQQWSSNPWTFGGGTKLEIK

SEQ ID NO: 768 - protein, 111 aa, Artificial Sequence
  Synthetic polymer.
DIVLTQSPASLAVSLGQRATISCRASQSVSTSSYSYMHWYQQKPGQPPKLLIKYASNLESGVPARFSGSGSGTDFTLNIHPVEEEDTATYYCQNSWEIPYTFGGGTKLEIK

SEQ ID NO: 769 - protein, 113 aa, Artificial Sequence
  Synthetic polymer.
DIVMTQTPSSLAVSLGEKVTMSCKSSQSLLYSSNQKNSLAWYQQKPGQSPKLLIYWASNRESGVPDRFTGSSSGTDFTLTISSVKAEDLAVYYCQQYYSYPLTFGAGTKLELK

SEQ ID NO: 770 - protein, 111 aa, Artificial Sequence
  Synthetic polymer.
DIVLTQSPASLAVSLGQRATISCRASQSVSTSSYSYVHWYQQKPGQPPKLLIKYASNLESGVPARFSGSGSGTDFTLNIHPVEEEDTATYYCQHSWEIPYTFGGGTKLEIK

SEQ ID NO: 771 - protein, 107 aa, Artificial Sequence
  Synthetic polymer.
DIQMTQSPSSLSASVGDRVTITCKASQSVSNDVAWYQQKPGKAPKLLIYYAANRYTGVPDRFSGSGYGTDFTFTISSLQPEDIATYFCQQDYTSPYTFGQGTKLEIK

SEQ ID NO: 772 - protein, 111 aa, Artificial Sequence
  Synthetic polymer.
DIVLTQSPASLAVSPGQRATITCRASQSVSTSSSSFMHWYQQKPGQPPKLLIKYASNLESGVPARFSGSGSGTDFTLTINPVEANDTANYYCQHSWEIPYTFGQGTKLEIK

SEQ ID NO: 773 - protein, 117 aa, Artificial Sequence
  Synthetic polymer.
EVQLVQSGAEVKKPGESLRISCKGSGYTFTTYWMHWVRQATGQGLEWMGNIYPGTGGSNFDEKFKNRVTITADKSTSTAYMELSSLRSEDTAVYYCTRWTTGTGAYWGQGTTVTVSS

SEQ ID NO: 774 - protein, 117 aa, Artificial Sequence
  Synthetic polymer.
EVQLVQSGAEVKKPGESLRISCKGSGYTFTTYWMHWIRQSPSRGLEWLGNIYPGTGGSNFDEKFKNRFTISRDNSKNTLYLQMNSLRAEDTAVYYCTRWTTGTGAYWGQGTTVTVSS

SEQ ID NO: 775 - protein, 117 aa, Artificial Sequence
  Synthetic polymer.
QVQLVQSGAEVKKPGASVKVSCKASGYTFTTYWMHWIRQSPSRGLEWLGNIYPGTGGSNFDEKFKNRFTISRDNSKNTLYLQMNSLRAEDTAVYYCTRWTTGTGAYWGQGTTVTVSS

SEQ ID NO: 776 - protein, 117 aa, Artificial Sequence
  Synthetic polymer.
EVQLVQSGAEVKKPGESLRISCKGSGYTFTTYWMHWVRQAPGQGLEWMGNIYPGTGGSNFDEKFKNRFTISRDNSKNTLYLQMNSLRAEDTAVYYCTRWTTGTGAYWGQGTTVTVSS

SEQ ID NO: 777 - protein, 113 aa, Artificial Sequence
  Synthetic polymer.
EIVLTQSPATLSLSPGERATLSCKSSQSLLDSGNQKNFLTWYQQKPGQAPRLLIYWASTRESGVPSRFSGSGSGTEFTLTISSLQPDDFATYYCQNDYSYPYTFGQGTKVEIK

SEQ ID NO: 778 - protein, 113 aa, Artificial Sequence
  Synthetic polymer.
DIQMTQSPSSLSASVGDRVTITCKSSQSLLDSGNQKNFLTWYQQKPGQAPRLLIYWASTRESGIPPRFSGSGYGTDFTLTINNIESEDAAYYFCQNDYSYPYTFGQGTKVEIK

SEQ ID NO: 779 - protein, 113 aa, Artificial Sequence
  Synthetic polymer.
EIVLTQSPATLSLSPGERATLSCKSSQSLLDSGNQKNFLTWYQQKPGKAPKLLIYWASTRESGVPSRFSGSGSGTDFTFTISSLQPEDIATYYCQNDYSYPYTFGQGTKVEIK

SEQ ID NO: 780 - protein, 113 aa, Artificial Sequence
  Synthetic polymer.
DIVMTQTPLSLPVTPGEPASISCKSSQSLLDSGNQKNFLTWYQQKPGQAPRLLIYWASTRESGVPSRFSGSGSGTDFTFTISSLEAEDAATYYCQNDYSYPYTFGQGTKVEIK

SEQ ID NO: 781 - protein, 113 aa, Artificial Sequence
  Synthetic polymer.
EIVLTQSPATLSLSPGERATLSCKSSQSLLDSGNQKNFLTWYQQKPGKAPKLLIYWASTRESGVPSRFSGSGSGTDFTFTISSLEAEDAATYYCQNDYSYPYTFGQGTKVEIK

SEQ ID NO: 782 - protein, 113 aa, Artificial Sequence
  Synthetic polymer.
EIVLTQSPDFQSVTPKEKVTITCKSSQSLLDSGNQKNFLTWYQQKPGQAPRLLIYWASTRESGVPSRFSGSGSGTDFTFTISSLEAEDAATYYCQNDYSYPYTFGQGTKVEIK

SEQ ID NO: 783 - protein, 113 aa, Artificial Sequence
  Synthetic polymer.
EIVLTQSPATLSLSPGERATLSCKSSQSLLDSGNQKNFLTWYQQKPGQAPRLLIYWASTRESGVPSRFSGSGSGTDFTFTISSLEAEDAATYYCQNDYSYPYTFGQGTKVEIK

SEQ ID NO: 784 - protein, 113 aa, Artificial Sequence
  Synthetic polymer.
DIQMTQSPSSLSASVGDRVTITCKSSQSLLDSGNQKNFLTWYLQKPGQSPQLLIYWASTRESGVPSRFSGSGSGTDFTFTISSLEAEDAATYYCQNDYSYPYTFGQGTKVEIK

SEQ ID NO: 785 - protein, 113 aa, Artificial Sequence
  Synthetic polymer.
DVVMTQSPLSLPVTLGQPASISCKSSQSLLDSGNQKNFLTWYQQKPGKAPKLLIYWASTRESGVPSRFSGSGSGTDFTFTISSLEAEDAATYYCQNDYSYPYTFGQGTKVEIK

SEQ ID NO: 786 - protein, 118 aa, Artificial Sequence
  Synthetic polymer.
EVQLVESGGGLVQPGGSLRLSCAASGFTFSDSWIHWVRQAPGKGLEWVAWISPYGGSTYYADSVKGRFTISADTSKNTAYLQMNSLRAEDTAVYYCARRHWPGGFDYWGQGTLVTVSA

SEQ ID NO: 787 - protein, 108 aa, Artificial Sequence
  Synthetic polymer.
DIQMTQSPSSLSASVGDRVTITCRASQDVSTAVAWYQQKPGKAPKLLIYSASFLYSGVPSRFSGSGSGTDFTLTISSLQPEDFATYYCQQYLYHPATFGQGTKVEIKR

SEQ ID NO: 788 - protein, 126 aa, Artificial Sequence
  Synthetic polymer.
EVQLVESGGGLVQPGGSLRLSCAASGFTLDYYAIGWFRQAPGKEREWASSISSSDGSTYYADSVKGRFTISRDNAKNTVFLQMNSLKPEDTAVYSCAASQAPITIATMMKPFYDYWGQGTQVTVSS

SEQ ID NO: 789 - protein, 123 aa, Artificial Sequence
  Synthetic polymer.
EVQLVESGGGLVQPGGSLRLSCAASGFTLDYYAKCWFRQAPGKEREWVSCISSSDGSTYYADSVKGRFTISRDNAKNTVYLQMNSLKPEDTAVYFCAARHGGPLTVEYFFDYWGQGTQVTVSS

SEQ ID NO: 790 - protein, 124 aa, Artificial Sequence
  Synthetic polymer.
EVQLVESGGGLVQPGGSLRLSCAASGFTFDYYAIGWFRQAPGKAREGVSCISGGDNSTYYADSVKGRFTISRDNAKNTVYLQMNSLKPEDTAVYYCATGGWKYCSGYDPEYIYWGQGTQVTVSS

SEQ ID NO: 791 - protein, 115 aa, Artificial Sequence
  Synthetic polymer.
EVQLVESGGGLVQAGGSLRLSCAASGSTFSQYDVGWYRQAPGKQRELVAFSSSGGRTIYPDSVKGRFTFSRDNTKNTVYLQMTSLKPEDTAVYYCKIDWYLNSYWGQGTQVTVSS

SEQ ID NO: 792 - protein, 114 aa, Artificial Sequence
  Synthetic polymer.
EVQLVESGGGLVQAGGSLRLSCAASGVDASNSAMGWYRQAPGKQREWVARITGGGLIAYTDSVKGRFTISRDNAKSTVYLQMNSLEPEDTAVYYCNTINSRDGWGQGTQVTVSS

SEQ ID NO: 793 - protein, 111 aa, Artificial Sequence
  Synthetic polymer.
EVQLVESGGGLVQAGGSLTISCAASGITFSDSIVSWYRRARGKQREWVAGISNGGTTKYAESVLGRFTISRDNAKNNVYLQMNGLNPEDTAVYLCKVRQYWGQGTQVTVSS

SEQ ID NO: 794 - protein, 130 aa, Artificial Sequence
  Synthetic polymer.
EVQLVESGGGLVQAGGSLRLSCAASESTVLINAMGWYRQAPGKQRELVASISSGGSTNYADSVKGRFTISRDNAKNTVYLQMNSLKPEDTAVYYCNADVYPQDYGLGYVEGKVYYGHDYWGTGTLVTVSS

SEQ ID NO: 795 - protein, 119 aa, Artificial Sequence
  Synthetic polymer.
EVQLVESGGGLVQAGGSLRLSCAASGSTFSNYVSNYAMGWGRQAPGTQRELVASISNGDTTNYADSVKGRFTISRDNAKNTVYLQMNSLKPEDTAVYYCFEHQVAGLTWGQGTQVTVSS

SEQ ID NO: 796 - protein, 118 aa, Artificial Sequence
  Synthetic polymer.
  misc_feature (27)..(27): Xaa can be any naturally occurring amino acid
  misc_feature (32)..(32): Xaa can be any naturally occurring amino acid
  misc_feature (75)..(75): Xaa can be any naturally occurring amino acid
EVQLVESGGGLVQAGGSLRLSCVASGXALKIXVMGWYRQAPGKQRELVAAITSGGRTNYSDSVKGRFTISGDNAXNTVYLQMNSLKSEDTAVYYCREWNSGYPPVDYWGQGTQVTVSS

SEQ ID NO: 797 - protein, 120 aa, Artificial Sequence
  Synthetic polymer.
EVQLVESGGGLVQAGGSLRLSCAASGRTFSSGTMGWFRRAPGKEREFVASIPWSGGRTYYADSVKDRFTISRDNAQNTVFLQMNSLKPEDTAVYYCAFKERSTGWDFASWGQGIQVTVSS

SEQ ID NO: 798 - protein, 127 aa, Artificial Sequence
  Synthetic polymer.
EVQLVESGGGLVQTGGSLRLSCAASGFTLDYYGIGWFRQAPGKEREGVSFISGSDGSTYYAESVKGRFTISRDKAKNTVYLQMNSLKPEDTAVYYCAADPWGPPSIATMTSYEYKHWGQGTQVTVSS

SEQ ID NO: 799 - protein, 113 aa, Artificial Sequence
  Synthetic polymer.
EVQLVESGGGLVQPGGSLRLSCAASGFTFSTYTMIWLRRAPGKGFEWVSTIDKDGNTNYVDSVKGRFAVSRDNTKNTLYLQMNSLKPEDTAMYYCTKHGSSARGQGTRVTVSS

SEQ ID NO: 800 - protein, 114 aa, Artificial Sequence
  Synthetic polymer.
EVQLVESGGGLVEPGGSLRLSCVASGFTFSSYDMSWVRQAPGKGLEWVSTINSGGGITYRGSVKGRFTISRDNAKNTLYLQMNSLKPEDTAVYYCENGGSSYRRGQGTQVTVSS

SEQ ID NO: 801 - protein, 114 aa, Artificial Sequence
  Synthetic polymer.
QVQLVQSGAELKKPGASVKMSCKASGYTFTGYTMHWVKQAPGQGLEWIGYINPRSGYTEYNQKFKDRTTLTADKSTSTAYMELSSLRSEDSAVYYCARPWFAYWGQGTLVTVSS

SEQ ID NO: 802 - protein, 114 aa, Artificial Sequence
  Synthetic polymer.
QVQLVQSGAEVKKPGASVKMSCKASGYTFTGYTMHWVKQAPGQGLEWIGYINPRSGYTEYNQKFKDRTTLTADKSTSTAYMELSSLRSEDTAVYYCARPWFAYWGQGTLVTVSS

SEQ ID NO: 803 - protein, 114 aa, Artificial Sequence
  Synthetic polymer.
QVQLVQSGAEVKKPGASVKMSCKASGYTFTGYTMHWVRQAPGQGLEWIGYINPRSGYTEYNQKFKDRTTLTADKSTSTAYMELSSLRSEDTAVYYCARPWFAYWGQGTLVTVSS

SEQ ID NO: 804 - protein, 114 aa, Artificial Sequence
  Synthetic polymer.
QVQLVQSGAEVKKPGASVKVSCKASGYTFTGYTMHWVRQAPGQGLEWIGYINPRSGYTEYNQKFKDRTTLTADKSTSTAYMELSSLRSEDTAVYYCARPWFAYWGQGTLVTVSS

SEQ ID NO: 805 - protein, 114 aa, Artificial Sequence
  Synthetic polymer.
QVQLVQSGAEVKKPGASVKVSCKASGYTFTGYTMHWVRQAPGQGLEWIGYINPRSGYTEYNQKFKDRTTITADKSTSTAYMELSSLRSEDTAVYYCARPWFAYWGQGTLVTVSS

SEQ ID NO: 806 - protein, 113 aa, Artificial Sequence
  Synthetic polymer.
DIVMTQSPASLTVTPGEKVTITCKSSQSLLNSGNQKNYLTWYQQKPGQPPKLLIYWASTRESGVPDRFTGSGSGTDFTLTISSLQAEDVAVYYCQNDYSYPLTFGQGTKLEIK

SEQ ID NO: 807 - protein, 113 aa, Artificial Sequence
  Synthetic polymer.
DIVMTQSPASLSVTPGEKVTITCKSSQSLLNSGNQKNYLTWYQQKPGQPPKLLIYWASTRESGVPDRFTGSGSGTDFTLTISSLQAEDVAVYYCQNDYSYPLTFGQGTKLEIK

SEQ ID NO: 808 - protein, 113 aa, Artificial Sequence
  Synthetic polymer.
DIVMTQSPAFLSVTPGEKVTITCKSSQSLLNSGNQKNYLTWYQQKPGQPPKLLIYWASTRESGVPDRFTGSGSGTDFTLTISSLQAEDVAVYYCQNDYSYPLTFGQGTKLEIK

SEQ ID NO: 809 - protein, 113 aa, Artificial Sequence
  Synthetic polymer.
DIVMTQSPAFLSVTPGEKVTITCKSSQSLLNSGNQKNYLTWYQQKPGQPPKLLIYWASTRESGVPDRFSGSGSGTDFTLTISSLQAEDVAVYYCQNDYSYPLTFGQGTKLEIK

SEQ ID NO: 810 - protein, 5 aa, Artificial Sequence
  Synthetic polymer.
GGGGS

SEQ ID NO: 811 - protein, 10 aa, Artificial Sequence
  Synthetic polymer.
GGGGSGGGGS

SEQ ID NO: 812 - protein, 15 aa, Artificial Sequence
  Synthetic polymer.
GGGGSGGGGSGGGGS

SEQ ID NO: 813 - protein, 20 aa, Artificial Sequence
  Synthetic polymer.
GGGGSGGGGSGGGGSGGGGS

SEQ ID NO: 814 - protein, 25 aa, Artificial Sequence
  Synthetic polymer.
GGGGSGGGGSGGGGSGGGGSGGGGS

SEQ ID NO: 815 - protein, 30 aa, Artificial Sequence
  Synthetic polymer.
GGGGSGGGGSGGGGSGGGGSGGGGSGGGGS

SEQ ID NO: 816 - protein, 35 aa, Artificial Sequence
  Synthetic polymer.
GGGGSGGGGSGGGGSGGGGSGGGGSGGGGSGGGGS

SEQ ID NO: 817 - protein, 40 aa, Artificial Sequence
  Synthetic polymer.
GGGGSGGGGSGGGGSGGGGSGGGGSGGGGSGGGGSGGGGS

SEQ ID NO: 818 - protein, 16 aa, Artificial Sequence
  Synthetic polymer.
GGSGGSGGGGSGGGGS

SEQ ID NO: 819 - protein, 8 aa, Artificial Sequence
  Synthetic polymer.
GGGGGGGG

SEQ ID NO: 820 - protein, 6 aa, Artificial Sequence
  Synthetic polymer.
GGGGGG

SEQ ID NO: 821 - protein, 5 aa, Artificial Sequence
  Synthetic polymer.
EAAAK

SEQ ID NO: 822 - protein, 10 aa, Artificial Sequence
  Synthetic polymer.
EAAAKEAAAK

SEQ ID NO: 823 - protein, 15 aa, Artificial Sequence
  Synthetic polymer.
EAAAKEAAAKEAAAK

SEQ ID NO: 824 - protein, 12 aa, Artificial Sequence
  Synthetic polymer.
AEAAAKEAAAKA

SEQ ID NO: 825 - protein, 17 aa, Artificial Sequence
  Synthetic polymer.
AEAAAKEAAAKEAAAKA

SEQ ID NO: 826 - protein, 22 aa, Artificial Sequence
  Synthetic polymer.
AEAAAKEAAAKEAAAKEAAAKA

SEQ ID NO: 827 - protein, 27 aa, Artificial Sequence
  Synthetic polymer.
AEAAAKEAAAKEAAAKEAAAKEAAAKA

SEQ ID NO: 828 - protein, 46 aa, Artificial Sequence
  Synthetic polymer.
AEAAAKEAAAKEAAAKEAAAKALEAEAAAKEAAAKEAAAKEAAAKA

SEQ ID NO: 829 - protein, 5 aa, Artificial Sequence
  Synthetic polymer.
PAPAP

SEQ ID NO: 830 - protein, 18 aa, Artificial Sequence
  Synthetic polymer.
KESGSVSSEQLAQFRSLD

SEQ ID NO: 831 - protein, 14 aa, Artificial Sequence
  Synthetic polymer.
EGKSSGSGSESKST

SEQ ID NO: 832 - protein, 12 aa, Artificial Sequence
  Synthetic polymer.
GSAGSAAGSGEF

SEQ ID NO: 833 - protein, 5 aa, Artificial Sequence
  Synthetic polymer.
GGGSE

SEQ ID NO: 834 - protein, 5 aa, Artificial Sequence
  Synthetic polymer.
GSESG

SEQ ID NO: 835 - protein, 5 aa, Artificial Sequence
  Synthetic polymer.
GSEGS

SEQ ID NO: 836 - protein, 35 aa, Artificial Sequence
  Synthetic Sequence
GEGGSGEGSSGEGSSSEGGGSEGGGSEGGGSEGGS

SEQ ID NO: 837 - protein, 117 aa, Artificial Sequence
  Synthetic Sequence
QVQLQESGGGLVQPGGSLRLSCAVSGTMLSRNAMGWYRQAPGKPRQWVAGITSDGLGNYVGFAKGRFTISRDNAKNTVYLQMNTLKPDDTAVYHCNFWPPPSGRPIWGQGTQVTVSS

SEQ ID NO: 838 - protein, 117 aa, Artificial Sequence
  Synthetic
QVQLQESGGGLVQPGGSLRLSCAVSGTMLSRNAMGWYRQAPGKQRQWVAGITSDGLGNYVDFVKGRFTISRDNARNTVYLQMNTLKPDDTAVYYCNFWPPPSDRPIWGQGTQVTVSS

SEQ ID NO: 839 - protein, 116 aa, Artificial Sequence
  Synthetic
QVQLQESGGGLVQAGGSLRLSCAVSGSTARLDAMGWYRQAPGKQREWVAGIDSADITDYARFVKGRFTISRDNAKNTVYLQMNSLKPEDTAVYYCNKWPPSVPPNWGHGTQVTVSS

SEQ ID NO: 840 - protein, 116 aa, Artificial Sequence
  Synthetic
QVQLQESGGGLVQAGGSLRLSCAVSGSTARLDAMGWYRQAPGKQREWVAGIDSADITDYARFVKGRFTISRDNAKNTVYLQMNSLKPEDTAVYYCNKWPPSVPPNWGQGTQVTVSS

SEQ ID NO: 841 - protein, 124 aa, Artificial Sequence
  Synthetic
QVQLQESGGGLVQAGGSLRLSCVHSGGIFTIGPLGWYRQAPGSQRELVATVTNGGGTYYADSVKGRFTISRDNAKNTVYLQMNSLKPEDTAVYYCNAAVVTAKGMGAIQSRGYWGQGTQVTVSS

SEQ ID NO: 842 - protein, 124 aa, Artificial Sequence
  Synthetic
QVQLQESGGGLVQAGGSLRLSCAHSGGIFTIGPLGWYRQAPGSQRELVATVTNGGGTYYADSVKGRFTISRDNAKNTVYLQMNSLKPEDTAVYYCNAAVVTAKGMGAIQSRGYWGQGTQVTVSS

SEQ ID NO: 843 - protein, 116 aa, Artificial Sequence
  Synthetic
QVQLQESGGGLVQAGGSLRLSCAASGSTFSINAMMWYRQAPGKQRELVASIGSGGNTYYADSVKGRFTISRDNGKSTLYLQMNSLKPEDTAVYYCKMYRPGTYDYWGQGTQVTVSS

SEQ ID NO: 844 - protein, 116 aa, Artificial Sequence
  Synthetic
QVQLQESGGGWVQPGGSLRLSCAASGSTFSINAMMWYRQAPGKQRELVASIGSGGNTYYADSVKGRFTISRDNGKSTLYLQMNSLKPEDTAVYYCKMYRPGTYDYWGQGTQVTVSS

SEQ ID NO: 845 - protein, 122 aa, Artificial Sequence
  Synthetic
QVQLQESGGGLVQAGGSLSVSCAASGSIFSMGWFRQAPGKQRELVAAVTSGGVTNYADSVKGRFTISRDNAKNTVYLQMKSLKPEDTAVYYCAADSSRGKIYFSNYRSWNYWGQGTQVTVSS

SEQ ID NO: 846 - protein, 115 aa, Artificial Sequence
  Synthetic
QVQLQESGGGLVQAGESLRLSCAVSATISSMNSMAWYRQAPGKQREWVAGLETGGRANYVDSVKGRFTISRDNARNTVLLQMNSLKPEDTAVYYCNRWPPLRSSWGQGTQVTVSS

SEQ ID NO: 847 - protein, 116 aa, Artificial Sequence
  Synthetic
QVQLQESGGGLVQPGESLRLSCAASGSISSRNAMGWYRQAPGKEREWVAGITSDGITNYADSVKGRFTISRDNAKNTVGLQMNSLKPDDTAVYYCNFWPPLYGRPWGQGTQVTVSS

SEQ ID NO: 848 - protein, 116 aa, Artificial Sequence
  Synthetic
QVQLQESGGGLVQPGGSLRLSCAASGFIFRSTSMGWYRQAPGKQREFVAGIIGSHSTNYADSVKGRFTISRDNAQNAVYLHMNTLKPEDTAVYYCNLYPPASSGRWGKGTQVTVSS

SEQ ID NO: 849 - protein, 116 aa, Artificial Sequence
  Synthetic
QVQLQESGGGLVQAGGSLRLSCAASLKISSINAMAWYRQAAGKQRELVAGIATDGRTNYAHSVKGRFTISRDNAKNTVYLQMNSLKPEDTAVYYCNQWPPRALDAWGQGTQVTVSS

SEQ ID NO: 850 - protein, 117 aa, Artificial Sequence
  Synthetic
QVQLQESGGGLVQPGGSLRLSCAASGVTFGIGAMGWYRQTPENERELVAAISSGGSTNYAASVKGRFTISRDNAPNTVYLQMNSLKPEDTAIYYCNVRRGLAWYPGWGQGTQVTVSS

SEQ ID NO: 851 - protein, 10 aa, Artificial Sequence
  Synthetic
GSTFSVNAVG

SEQ ID NO: 852 - protein, 10 aa, Artificial Sequence
  Synthetic
GSTFTINAMA

SEQ ID NO: 853 - protein, 10 aa, Artificial Sequence
  Synthetic
GSTFTINAMG

SEQ ID NO: 854 - protein, 10 aa, Artificial Sequence
  Synthetic
GSTSSINAMA

SEQ ID NO: 855 - protein, 10 aa, Artificial Sequence
  Synthetic
GSTSSMNAMA

SEQ ID NO: 856 - protein, 10 aa, Artificial Sequence
  Synthetic
GTMLSRNAMG

SEQ ID NO: 857 - protein, 10 aa, Artificial Sequence
  Synthetic
GVELSRSAMA

SEQ ID NO: 858 - protein, 10 aa, Artificial Sequence
  Synthetic
GVTFGIGAMG

SEQ ID NO: 859 - protein, 10 aa, Artificial Sequence
  Synthetic
LKISSINAMA

SEQ ID NO: 860 - protein, 11 aa, Artificial Sequence
  Synthetic
SGSTFSINAMA

SEQ ID NO: 861 - protein, 10 aa, Artificial Sequence
  Synthetic
VNIVNLNSVG

SEQ ID NO: 862 - protein, 16 aa, Artificial Sequence
  Synthetic
GITSGGSTNYADSVKG

SEQ ID NO: 863 - protein, 15 aa, Artificial Sequence
  Synthetic
GITSGVTHYPDSVKG

SEQ ID NO: 864 - protein, 16 aa, Artificial Sequence
  Synthetic
GITSSGVTKYPDSVKG

SEQ ID NO: 865 - protein, 16 aa, Artificial Sequence
  Synthetic
GITSSGVTNYPDSVKG

SEQ ID NO: 866 - protein, 16 aa, Artificial Sequence
  Synthetic
GITSSGVTQYPDSVKG

SEQ ID NO: 867 - protein, 16 aa, Artificial Sequence
  Synthetic
GITTDGITKYPDSLKG

SEQ ID NO: 868 - protein, 16 aa, Artificial Sequence
  Synthetic
GLETGGRANYVDSVKG

SEQ ID NO: 869 - protein, 16 aa, Artificial Sequence
  Synthetic
SIGSGGNTYYADSVKG

SEQ ID NO: 870 - protein, 16 aa, Artificial Sequence
  Synthetic
SIISDGRTNYADSVKG

SEQ ID NO: 871 - protein, 16 aa, Artificial Sequence
  Synthetic
SITSAGSTNYAESVKG

SEQ ID NO: 872 - protein, 16 aa, Artificial Sequence
  Synthetic
SITSDGRTNYADSVKG

SEQ ID NO: 873 - protein, 16 aa, Artificial Sequence
  Synthetic
SITSGGRTNYADSVKG

SEQ ID NO: 874 - protein, 16 aa, Artificial Sequence
  Synthetic
SITSGGRTNYSDSVKG

SEQ ID NO: 875 - protein, 16 aa, Artificial Sequence
  Synthetic
TFTRGGDINYADSVKG

SEQ ID NO: 876 - protein, 16 aa, Artificial Sequence
  Synthetic
TVTNGGGTYYADSVKG

SEQ ID NO: 877 - protein, 8 aa, Artificial Sequence
  Synthetic
RWPPLRSS

SEQ ID NO: 878 - protein, 9 aa, Artificial Sequence
  Synthetic
TPPRIGRGY

SEQ ID NO: 879 - protein, 10 aa, Artificial Sequence
  Synthetic
VRRGLAWYPG

SEQ ID NO: 880 - protein, 121 aa, Artificial Sequence
  Synthetic
QVQLQQSGPGLVKPSQTLSLTCAISGDSVSSNSVTWNWIRQSPSRGLEWLGRTYYRSKWYNDYAVSVKGRITINPDTSKNQFYLQLKSVTPEDAAVYYCARDSSILYGDYWGQGTLVTVSS

SEQ ID NO: 881 - protein, 115 aa, Artificial Sequence
  Synthetic
QAVLTQPSSLSASPGASASLTCTLPSGINVGTYRIFWFQQKPGSPPQYLLSYKSDSDNHQGSGVPSRFSGSKDASANAGILLISGLQSEDEADYYCMIWHSSAWVFGGGTKLTVL

SEQ ID NO: 882 - protein, 12 aa, Artificial Sequence
  Synthetic (VH chain of NI-206.82C2)
GDSVSSNSVTWN

SEQ ID NO: 883 - protein, 14 aa, Artificial Sequence
  Synthetic (VH chain of NI-206.82C2)
CDRRTYYRSKWYND

SEQ ID NO: 884 - protein, 9 aa, Artificial Sequence
  Synthetic (VH chain of NI-206.82C2)
DSSILYGDY

SEQ ID NO: 885 - protein, 121 aa, Artificial Sequence; identical to SEQ ID NO: 719
  Synthetic polymer.

SEQ ID NO: 886 - protein, 108 aa, Artificial Sequence; identical to SEQ ID NO: 730
  Synthetic polymer.

SEQ ID NO: 887 - protein, 448 aa, Artificial Sequence
  Synthetic polymer.
EVQLVESGGGLVQPGGSLRLSCAASGFTFSDSWIHWVRQAPGKGLEWVAWISPYGGSTYYADSVKGRFTISADTSKNTAYLQMNSLRAEDTAVYYCARRHWPGGFDYWGQGTLVTVSSASTKGPSVFPLAPSSKSTSGGTAALGCLVKDYFPEPVTVSWNSGALTSGVHTFPAVLQSSGLYSLSSVVTVPSSSLGTQTYICNVNHKPSNTKVDKKVEPKSCDKTHTCPPCPAPELLGGPSVFLFPPKPKDTLMISRTPEVTCVVVDVSHEDPEVKFNWYVDGVEVHNAKTKPREEQYASTYRVVSVLTVLHQDWLNGKEYKCKVSNKALPAPIEKTISKAKGQPREPQVYTLPPSREEMTKNQVSLTCLVKGFYPSDIAVEWESNGQPENNYKTTPPVLDSDGSFFLYSKLTVDKSRWQQGNVFSCSVMHEALHNHYTQKSLSLSPGK

SEQ ID NO: 888 - protein, 214 aa, Artificial Sequence
  Synthetic polymer.
DIQMTQSPSSLSASVGDRVTITCRASQDVSTAVAWYQQKPGKAPKLLIYSASFLYSGVPSRFSGSGSGTDFTLTISSLQPEDFATYYCQQYLYHPATFGQGTKVEIKRTVAAPSVFIFPPSDEQLKSGTASVVCLLNNFYPREAKVQWKVDNALQSGNSQESVTEQDSKDSTYSLSSTLTLSKADYEKHKVYACEVTHQGLSSPVTKSFNRGEC

SEQ ID NO: 889 - protein, 450 aa, Artificial Sequence
  Synthetic polymer.
EVQLLESGGGIYPSGGITFYLGTVTTVDYWDYFPEPVTVSYICNVNHKPSKDTLMISRTPSTYRVVSVLTVYTLPPSRDELDSDGSFFLYLVQPGGSLRLADTVKGRFTIGQGTLVTVSSWNSGALTSGVNTKVDKKVEPEVTCVVVDVSVLHQDWLNGKLTKNQVSLTCSKLTVDKSRWSCAASGFTFSSRDNSKNTLYASTKGPSVFPHTFPAVLQSSKSCDKTHTCPHEDPEVKFNWEYKCKVSNKALVKGFYPSDIQQGNVFSCSVSYIMMWVRQALQMNSLRAEDLAPSSKSTSGGLYSLSSVVTPCPAPELLGGYVDGVEVHNALPAPIEKTISAVEWESNGQPMHEALHNHYTPGKGLEWVSSTAVYYCARIKGTAALGCLVKVPSSSLGTQTPSVFLFPPKPKTKPREEQYNKAKGQPREPQENNYKTTPPVQKSLSLSPGK

SEQ ID NO: 890 - protein, 216 aa, Artificial Sequence
  Synthetic polymer.
QSALTQPASVSGSPGQSITISCTGTSSDVGGYNYVSWYQQHPGKAPKLMIYDVSNRPSGVSNRFSGSKSGNTASLTISGLQAEDEADYYCSSYTSSSTRVFGTGTKVTVLGQPKANPTVTLFPPSSEELQANKATLVCLISDFYPGAVTVAWKADGSPVKAGVETTKPSKQSNNKYAASSYLSLTPEQWKSHRSYSCQVTHEGSTVEKTVAPTECS

SEQ ID NO: 891 - protein, 123 aa, Artificial Sequence
  Synthetic polymer.
QVQLVQSGAEVKKPGSSVKVSCKTSGDTESTYAISWVRQAPGQGLEWMGGIIPIEGKAHYAQKFQGRVTITADESTSTAYMELSSLRSEDTAVYFCARKFHEVSGSPFGMDVWGQGTTVTVSS

SEQ ID NO: 892 - protein, 106 aa, Artificial Sequence
  Synthetic polymer.
EIVLTQSPATLSLSPGERATLSCRASQSVSSYLAWYQQKPGQAPRLLIYDASNRATGIPARFSGSGSGTDFTLTISSLEPEDFAVYYCQQRSNWPTFGQGTKVEIK

SEQ ID NO: 893 - protein, 117 aa, Artificial Sequence
  Synthetic polymer.
QVQLVQSGAEVKKPGASVKVSCKASGYTFTDYGFSWVRQAPGQGLEWMGWITAYNGNTNYAQKLQGRVTMTTDTSTSTVYMELRSLRSDDTAVYYCARDYFYGMDVWGQGTTVTVSS

SEQ ID NO: 894 - protein, 107 aa, Artificial Sequence
  Synthetic polymer.
EIVLTQSPATLSLSPGERATLSCRASQSVSSYLVWYQQKPGQAPRLLIYDASNRATGIPARFSGSGSGTDFTLTISSLEPEDFAVYYCQQRSNWPRTFGQGTKVEIK

SEQ ID NO: 895 - protein, 118 aa, Artificial Sequence
  Synthetic polymer.
QVQLVQSGAEVKKPGASVKVSCKASGYTFTSYDVHWVRQAPGQRLEWMGWLHADTGITKFSQKFQGRVTITRDTSASTAYMELSSLRSEDTAVYYCARERIQLWFDYWGQGTLVTVSS

SEQ ID NO: 896 - protein, 107 aa, Artificial Sequence
  Synthetic polymer.
DIQMTQSPSSLSASVGDRVTITCRASQGISSWLAWYQQKPEKAPKSLIYAASSLQSGVPSRFSGSGSGTDFTLTISSLQPEDFATYYCQQYNSYPYTFGQGTKLEIK

SEQ ID NO: 897 - protein, 120 aa, Artificial Sequence
  Synthetic polymer.
QVQLVQSGAEVKKPGSSVKVSCKVSGGIFSTYAINWVRQAPGQGLEWMGGIIPIFGTANHAQKFQGRVTITADESTSTAYMELSSLRSEDTAVYYCARDQGIAAALFDYWGQGTLVTVSS

SEQ ID NO: 898 - protein, 108 aa, Artificial Sequence
  Synthetic polymer.
EIVLTQSPGTLSLSPGERATLSCRASQSVSSSYLAWYQQKPGQAPRLLIYGASSRATGIPDRFSGSGSGTDFTLTISRLEPEDFAVYYCQQYGSSPWTFGQGTKVEIK

SEQ ID NO: 899 - protein, 113 aa, Artificial Sequence
  Synthetic polymer.
EVQLVESGGGLVQPGRSLRLSCAVSGETFDDYVVHWVRQAPGKGLEWVSGISGNSGNIGYADSVKGRFTISRDNAKNSLYLQMNSLRAEDTALYYCAVPFDYWGQGTLVTVSS

SEQ ID NO: 900 - protein, 107 aa, Artificial Sequence; identical to SEQ ID NO: 896
  Synthetic polymer.

SEQ ID NO: 901 - protein, 123 aa, Artificial Sequence
  Synthetic polymer.
QVQLVQSGAEVKKPGSSVKVSCKTSGDTFSSYAISWVRQAPGQGLEWMGGIIPIFGRAHYAQKFQGRVTITADESTSTAYMELSSLRSEDTAVYFCARKFHEVSGSPFGMDVWGQGTTVTVSS

SEQ ID NO: 902 - protein, 106 aa, Artificial Sequence; identical to SEQ ID NO: 892
  Synthetic polymer.

SEQ ID NO: 903 - protein, 123 aa, Artificial Sequence
  Synthetic polymer.
QVQLVQSGAEVKKPGSSVKVSCKTSGGTFSSYAISWVRQAPGQGLEWMGGIIPIFGKAHYAQKFQGRVTITADESTTTAYMELSSLRSEDTAVYYCARKYDYVSGSPFGMDVWGQGTTVTVSS

SEQ ID NO: 904 - protein, 106 aa, Artificial Sequence; identical to SEQ ID NO: 892
  Synthetic polymer.

SEQ ID NO: 905 - protein, 121 aa, Artificial Sequence
  Synthetic polymer.
QVQLVQSGAEVKKPGSSVKVSCKASGGTFSSYAINWVRQAPGQGLEWMGGIIPIFGSANYAQKFQDRVTITADESTSAAYMELSSLRSEDTAVYYCARDSSGWSRYYMDVWGQGTTVTVSS

SEQ ID NO: 906 - protein, 106 aa, Artificial Sequence
  Synthetic polymer.
EIVLTQSPGTLSLSPGERATLSCRASQSVSSSYLAWYQQKPGQAPRLLIYGASSRATGIPDRFSGSGSGTDFTLTISRLEPEDFAVYYCQQYGSSPFGGGTKVEIK

SEQ ID NO: 907 - protein, 123 aa, Artificial Sequence
  Synthetic polymer.
QVQLVQSGAEVKEPGSSVKVSCKASGGTFNSYAISWVRQAPGQGLEWMGGIIPLFGIAHYAQKFQGRVTITADESTNTAYMDLSSLRSEDTAVYYCARKYSYVSGSPFGMDVWGQGTTVTVSS

SEQ ID NO: 908 - protein, 106 aa, Artificial Sequence
  Synthetic polymer.
EIVLTQSPATLSLSPGERATLSCRASQSVSSYLAWYQQKPGQAPRLLIYDASNRATGIPARFSGSGSGTDFTLTISSLEPEDFAVYYCQQRSNWPTFGQGTRLEIK

SEQ ID NO: 909 - protein, 121 aa, Artificial Sequence
  Synthetic polymer.
EVQLVESGGGLVQPGRSLRLSCAASGITFDDYGMHWVRQAPGKGLEWVSGISWNRGRIEYADSVKGRFTISRDNAKNSLYLQMNSLRAEDTALYYCAKGRFRYFDWFLDYWGQGTLVTVSS

SEQ ID NO: 910 - protein, 107 aa, Artificial Sequence
  Synthetic polymer.
AIQLTQSPSSLSASVGDRVTITCRASQGISSALAWYQQKPGKAPKLLIYDASSLESGVPSRFSGSGSGTDFTLTISSLQPEDFATYYCQQFNSYPFTFGPGTKVDIK

SEQ ID NO: 911 - protein, 118 aa, Artificial Sequence
  Synthetic polymer.
EVKLQESGPSLVKPSQTLSLTCSVTGYSITSDYWNWIRKFPGNKLEYVGYISYTGSTYYNPSLKSRISITRDTSKNQYYLQLNSVTSEDTATYYCARYGGWLSPFDYWGQGTTLTVSS

SEQ ID NO: 912 - protein, 107 aa, Artificial Sequence
  Synthetic polymer.
DIVMTQSHKLMSTSVGDRVSITCKASQDVGTAVAWYQQKPGQSPKLLIYWASTRHTGVPDRFTGSGSGTDFTLTISNVQSEDLADYFCQQDSSYPLTFGAGTKVELK

SEQ ID NO: 913 - protein, 120 aa, Artificial Sequence
  Synthetic polymer.
EVQLQESGPGLVAPSQSLSITCTVSGFSLTTYSINWIRQPPGKGLEWLGVMWAGGGTNSNSVLKSRLIISKDNSKSQVFLKMNSLQTDDTARYYCARYYGNSPYYAIDYWGQGTSVTVSS

SEQ ID NO: 914 - protein, 107 aa, Artificial Sequence
  Synthetic polymer.
DIVTTQSHKLMSTSVGDRVSITCKASQDVGTAVAWYQQKPGQSPKLLIYWASTRHTGVPDRFTGSGSGTDFTLTISNVQSEDLADYFCQQDSSYPLTFGAGTKVELK

SEQ ID NO: 915 - protein, 14 aa, Artificial Sequence
  Synthetic (VL chain of NI-206.82C2)
TLPSGINVGTYRIF

SEQ ID NO: 916 - protein, 7 aa, Artificial Sequence
  Synthetic (VL chain of NI-206.82C2)
KSDSDNH

SEQ ID NO: 917 - protein, 9 aa, Artificial Sequence
  Synthetic (VL chain of NI-206.82C2)
MIWHSSAWV

SEQ ID NO: 918 - protein, 122 aa, Artificial Sequence
  Synthetic
QVQLVQSGAEVKKPGASVKVSCKTSGYTFTDYYIHWVRQAPGQGLEWMGWINPNRGGTNYAQKFQGRVTMTRDTSIATAYMELSRLRSDDTAVYYCATASLKIAAVGTFDCWGQGTLVTVSS

SEQ ID NO: 919 - protein, 107 aa, Artificial Sequence
  Synthetic
SYELTQPPSVSVSPGQTARITCSGDALSKQYAFWFQQKPGQAPILVIYQDTKRPSGIPGRFSGSSSGTTVTLTISGAQADDEADYYCQSADSSGTYVFGTGTKVTVL

SEQ ID NO: 920 - protein, 10 aa, Artificial Sequence
  Synthetic
GYTFTDYYIH

SEQ ID NO: 921 - protein, 10 aa, Artificial Sequence
  Synthetic
WINPNRGGTN

SEQ ID NO: 922 - protein, 13 aa, Artificial Sequence
  Synthetic
ASLKIAAVGTFDC

SEQ ID NO: 923 - protein, 11 aa, Artificial Sequence
  Synthetic
SGDALSKQYAF

SEQ ID NO: 924 - protein, 7 aa, Artificial Sequence
  Synthetic
QDTKRPS

SEQ ID NO: 925 - protein, 10 aa, Artificial Sequence
  Synthetic
QSADSSGTYV

SEQ ID NO: 926 - protein, 116 aa, Artificial Sequence
  Synthetic
EVQLVETGGGVVQPGRSLRLSCAASGFSFSTHGMYWVRQPPGKGLEWVAVISYDGSDKKYADSVKGRFTISRDNSKNTVYLEMSSVRAEDTALYYCFCRRDAFDLWGQGTMVTVSS

SEQ ID NO: 927 - protein, 108 aa, Artificial Sequence
  Synthetic
SYVLTQPPSVSVSPGQTARITCSGDALPKKYAYWYQQKSGQAPVLVIYEDTKRPSGIPERFSGSSSGTMATLTISGAQVEDEADYYCYSTDSSGNYWVFGGGTEVTVL

SEQ ID NO: 928 - protein, 10 aa, Artificial Sequence
  Synthetic
GFSFSTHGMY

SEQ ID NO: 929 - protein, 10 aa, Artificial Sequence
  Synthetic
VISYDGSDKK

SEQ ID NO: 930 - protein, 7 aa, Artificial Sequence
  Synthetic
RRDAFDL

SEQ ID NO: 931 - protein, 11 aa, Artificial Sequence
  Synthetic
SGDALPKKYAY

SEQ ID NO: 932 - protein, 7 aa, Artificial Sequence
  Synthetic
EDTKRPS

SEQ ID NO: 933 - protein, 11 aa, Artificial Sequence
  YSTDSSGNYWV
YSTDSSGNYWV

SEQ ID NO: 934 - protein, 124 aa, Artificial Sequence
  Synthetic
EVQLVESGGGLVEPGGSLRLSCAASGFTFSDAWMNWVRQAPGKGLEWVGRIKTKSDGGTTDYAAPVRGRFSISRDDSKNTLFLEMNSLKTEDTAIYYCFITVIVVSSESPLDHWGQGTLVTVSS

SEQ ID NO: 935 - protein, 108 aa, Artificial Sequence
  Synthetic
SYELTQPPSVSVSPGQTARITCSGDELPKQYAYWYQQKPGQAPVLVIYKDRQRPSGIPERFSGSSSGTTVTLTISGVQAEDEADYYCQSAYSINTYVIFGGGTKLTVL

SEQ ID NO: 936 - protein, 10 aa, Artificial Sequence
  Synthetic
GFTFSDAWMN

SEQ ID NO: 937 - protein, 12 aa, Artificial Sequence
  Synthetic
RIKTKSDGGTTD

SEQ ID NO: 938 - protein, 13 aa, Artificial Sequence
  Synthetic
TVIVVSSESPLDH

SEQ ID NO: 939 - protein, 11 aa, Artificial Sequence
  Synthetic
SGDELPKQYAY

SEQ ID NO: 940 - protein, 7 aa, Artificial Sequence
  Synthetic
KDRQRPS

SEQ ID NO: 941 - protein, 11 aa, Artificial Sequence
  Synthetic
QSAYSINTYVI

SEQ ID NO: 942 - protein, 125 aa, Artificial Sequence
  Synthetic
EVQLVESGGGLVKPGGSLRLSCAASGFTFSDYYMSWIRQAPGKGLEWISYISSGSSYTNYADSVKGRFTISRDNAKKSVYLEVNGLTVEDTAVYYCARVRYGDREMATIGGFDFWGQGTLVTVSS

SEQ ID NO: 943 - protein, 108 aa, Artificial Sequence
  Synthetic
SYELTQPPSVSVSPGQTARITCSGDALPKQYAYWYQQSPGQAPVLVIYKDSERPSGIPERFSGSSSGTTVTLTISGVQAEDEADYYCQSADSGGTSRIFGGGTKLTVL

SEQ ID NO: 944 - protein, 10 aa, Artificial Sequence
  Synthetic
GFTFSDYYMS

SEQ ID NO: 945 - protein, 10 aa, Artificial Sequence
  Synthetic
YISSGSSYTN

SEQ ID NO: 946 - protein, 16 aa, Artificial Sequence
  Synthetic
VRYGDREMATIGGFDF

SEQ ID NO: 947 - protein, 11 aa, Artificial Sequence
  Synthetic
SGDALPKQYAY

SEQ ID NO: 948 - protein, 7 aa, Artificial Sequence
  Synthetic
KDSERPS

SEQ ID NO: 949 - protein, 11 aa, Artificial Sequence
  Synthetic
QSADSGGTSRI

SEQ ID NO: 950 - protein, 124 aa, Artificial Sequence
  Synthetic
QVQLQESGPGLVRSTETLSLTCLVSGDSINSHYWSWLRQSPGRGLEWIGYIYYTGPTNYNPSLKSRVSISLGTSKDQFSLKLSSVTAADTARYYCARNKVFWRGSDFYYYMDVWGKGTTVTVSS

SEQ ID NO: 951 - protein, 110 aa, Artificial Sequence
  Synthetic
EIVLTQSPGTLSLSLGERATLSCRASQSLANNYLAWYQQKPGQAPRLLMYDASTRATGIPDRFSGSGSGTDFTLTISRLEPEDFAVYYCQQFVTSHHMYIFGQGTKVEIK

SEQ ID NO: 952 - protein, 10 aa, Artificial Sequence
  Synthetic
GDSINSHYWS

SEQ ID NO: 953 - protein, 9 aa, Artificial Sequence
  Synthetic
YIYYTGPTN

SEQ ID NO: 954 - protein, 16 aa, Artificial Sequence
  Synthetic
NKVFWRGSDFYYYMDV

SEQ ID NO: 955 - protein, 12 aa, Artificial Sequence
  Synthetic
RASQSLANNYLA

SEQ ID NO: 956 - protein, 7 aa, Artificial Sequence
  Synthetic
DASTRAT

SEQ ID NO: 957 - protein, 11 aa, Artificial Sequence
  Synthetic
QQFVTSHHMYI

SEQ ID NO: 958 - protein, 124 aa, Artificial Sequence
  Synthetic
QVQLVQSGAEVKKPGASVKVSCKTSRYTFTEYTIHWVRQAPGQRLEWIGGINPNNGIPNYNQKFKGRVTITVDTSASTAYMELSSLRSEDTAVYYCARRRIAYGYDEGHAMDYWGQGTLVTVSS

SEQ ID NO: 959 - protein, 113 aa, Artificial Sequence
  Synthetic
DIVMTQSPDSLAVSLGERATINCKSSQSLLYSRNQKNYLAWYQQKPGQPPKLLIFWASTRESGVPDRFSGSGFGTDFTLTISSLQAEDVAVYYCQQYFSYPLTFGQGTKVEIK

SEQ ID NO: 960 - protein, 10 aa, Artificial Sequence
  Synthetic
RYTFTEYTIH

SEQ ID NO: 961 - protein, 10 aa, Artificial Sequence
  Synthetic
GINPNNGIPN

SEQ ID NO: 962 - protein, 15 aa, Artificial Sequence
  Synthetic
RRIAYGYDEGHAMDY

SEQ ID NO: 963 - protein, 17 aa, Artificial Sequence
  Synthetic
KSSQSLLYSRNQKNYLA

SEQ ID NO: 964 - protein, 7 aa, Artificial Sequence
  Synthetic
WASTRES

SEQ ID NO: 965 - protein, 9 aa, Artificial Sequence
  Synthetic
QQYFSYPLT

SEQ ID NO: 966 - protein, 117 aa, Artificial Sequence
  Synthetic
QVQLQQSGAELARPGASVNLSCKASGYTFTNNGINWLKQRTGQGLEWIGEIYPRSTNTLYNEKFKGKATLTADRSSNTAYMELRSLTSEDSAVYFCARTLTAPFAFWGQGTLVTVSA

SEQ ID NO: 967 - protein, 107 aa, Artificial Sequence
  Synthetic
QIVLTQSPAIMSASPGEKVTMTCSASSGVNFMHWYQQKSGTSPKRWIFDTSKLASGVPARFSGSGSGTSYSLTISSMEAEDAATYYCQQWSFNPPTFGGGTKLEIKR

SEQ ID NO: 968 - protein, 10 aa, Artificial Sequence
  Synthetic
GYTFTNNGIN

SEQ ID NO: 969 - protein, 10 aa, Artificial Sequence
  Synthetic
EIYPRSTNTL

SEQ ID NO: 970 - protein, 8 aa, Artificial Sequence
  Synthetic
TLTAPFAF

SEQ ID NO: 971 - protein, 10 aa, Artificial Sequence
  Synthetic
SASSGVNFMH

SEQ ID NO: 972 - protein, 7 aa, Artificial Sequence
  Synthetic
DTSKLAS

SEQ ID NO: 973 - protein, 9 aa, Artificial Sequence
  Synthetic
QQWSFNPPT

SEQ ID NO: 974 - protein, 117 aa, Artificial Sequence
  Synthetic
QVQLVQSGAEVKKPGASVKVSCKASGYTFTNNGINWLRQAPGQGLEWMGEIYPRSTNTLYAQKFQGRVTITADRSSNTAYMELSSLRSEDTAVYFCARTLTAPFAFWGQGTLVTVSS

SEQ ID NO: 975 - protein, 107 aa, Artificial Sequence
  Synthetic
QIVLTQSPATLSLSPGERATLSCSASSGVNFMHWYQQKPGQAPRRLIFDTSKLASGIPARFSGSGSGTDYTLTISSLEPEDFAVYYCQQWSFNPPTFGQGTKVEIKR

SEQ ID NO: 976 - protein, 10 aa, Artificial Sequence
  Synthetic
GYTFTNNGIN

SEQ ID NO: 977 - protein, 10 aa, Artificial Sequence
  Synthetic
EIYPRSTNTL

SEQ ID NO: 978 - protein, 8 aa, Artificial Sequence
  Synthetic
TLTAPFAF

SEQ ID NO: 979 - protein, 10 aa, Artificial Sequence
  Synthetic
SASSGVNFMH

SEQ ID NO: 980 - protein, 7 aa, Artificial Sequence
  Synthetic
DTSKLAS

SEQ ID NO: 981 - protein, 9 aa, Artificial Sequence
  Synthetic
QQWSFNPPT

SEQ ID NO: 982 - protein, 117 aa, Artificial Sequence; identical to SEQ ID NO: 974
  Synthetic

SEQ ID NO: 983 - protein, 107 aa, Artificial Sequence
  Synthetic
QIVLTQSPATLSLSPGERATLSCSASSGVNFMHWYQQKPGQAPKRLIFDTSKLASGVPARFSGSGSGTDYTLTISSLEPEDFAVYYCQQWSFNPPTFGQGTKVEIKR

SEQ ID NO: 984 - protein, 10 aa, Artificial Sequence
  Synthetic
GYTFTNNGIN

SEQ ID NO: 985 - protein, 10 aa, Artificial Sequence
  Synthetic
EIYPRSTNTL

SEQ ID NO: 986 - protein, 8 aa, Artificial Sequence
  Synthetic
TLTAPFAF

SEQ ID NO: 987 - protein, 10 aa, Artificial Sequence
  Synthetic
SASSGVNFMH

SEQ ID NO: 988 - protein, 7 aa, Artificial Sequence
  Synthetic
DTSKLAS

SEQ ID NO: 989 - protein, 9 aa, Artificial Sequence
  Synthetic
QQWSFNPPT

SEQ ID NO: 990 - protein, 117 aa, Artificial Sequence
  Synthetic
EVQLLESGGGLVQPGGSLRLSCAASGFTFSSYAMSWVRQAPGKGLEWVSAISGSGGSTYYADSVKGRFTISRDNSKNTLYLQMNSLRAEDTAVYYCAKGWLGNFDYWGQGTLVTVSS

SEQ ID NO: 991 - protein, 109 aa, Artificial Sequence
  Synthetic
EIVLTQSPGTLSLSPGERATLSCRASQSVSRSYLAWYQQKPGQAPRLLIIGASTRATGIPDRFSGSGSGTDFTLTISRLEPEDFAVYYCQQGQVIPPTFGQGTKVEIKR

SEQ ID NO: 992 - protein, 10 aa, Artificial Sequence
  Synthetic
GFTFSSYAMS

SEQ ID NO: 993 - protein, 10 aa, Artificial Sequence
  Synthetic
AISGSGGSTY

SEQ ID NO: 994 - protein, 8 aa, Artificial Sequence
  Synthetic
GWLGNFDY

SEQ ID NO: 995 - protein, 12 aa, Artificial Sequence
  Synthetic
RASQSVSRSYLA

SEQ ID NO: 996 - protein, 7 aa, Artificial Sequence
  Synthetic
GASTRAT

SEQ ID NO: 997 - protein, 9 aa, Artificial Sequence
  Synthetic
QQGQVIPPT

SEQ ID NO: 998 - protein, 117 aa, Artificial Sequence
  Synthetic
EVQLLESGGGLVQPGGSLRLSCAASGFTFSSYAMSWVRQAPGKGLEWVSAISGSGGSTYYADSVKGRFTISRDNSKNTLYLQMNSLRAEDTAVYYCAKGWFGGFNYWGQGTLVTVSS

SEQ ID NO: 999 - protein, 109 aa, Artificial Sequence
  Synthetic
EIVLTQSPGTLSLSPGERATLSCRASQSVTSSYLAWYQQKPGQAPRLLINVGSRRATGIPDRFSGSGSGTDFTLTISRLEPEDFAVYYCQQGIMLPPTFGQGTKVEIKR

SEQ ID NO: 1000 - protein, 10 aa, Artificial Sequence
  Synthetic
GFTFSSYAMS

SEQ ID NO: 1001 - protein, 10 aa, Artificial Sequence
  Synthetic
AISGSGGSTY

SEQ ID NO: 1002 - protein, 8 aa, Artificial Sequence
  Synthetic
GWFGGFNY

SEQ ID NO: 1003 - protein, 12 aa, Artificial Sequence
  Synthetic
RASQSVTSSYLA

SEQ ID NO: 1004 - protein, 7 aa, Artificial Sequence
  Synthetic
VGSRRAT

SEQ ID NO: 1005 - protein, 9 aa, Artificial Sequence
  Synthetic
QQGIMLPPT

SEQ ID NO: 1006 - protein, 116 aa, Artificial Sequence
  Synthetic
QVQLLESGGGLVQPGGSLRLSCAASGFTFSSHAMSWVRQAPGKGLEWVSAIWASGEQYYADSVKGRFTISRDNSKNTLYLQMNSLRAEDTAVYYCAKGWLGNFDYWGQGTLVTVSS

SEQ ID NO: 1007 - protein, 109 aa, Artificial Sequence; identical to SEQ ID NO: 991
  Synthetic

SEQ ID NO: 1008 - protein, 10 aa, Artificial Sequence
  Synthetic
GFTFSSHAMS

SEQ ID NO: 1009 - protein, 9 aa, Artificial Sequence
  Synthetic
AIWASGEQY

SEQ ID NO: 1010 - protein, 8 aa, Artificial Sequence
  Synthetic
GWLGNFDY

SEQ ID NO: 1011 - protein, 12 aa, Artificial Sequence
  Synthetic
RASQSVSRSYLA

SEQ ID NO: 1012 - protein, 7 aa, Artificial Sequence
  Synthetic
GASTRAT

SEQ ID NO: 1013 - protein, 9 aa, Artificial Sequence
  Synthetic
QQGQVIPPT

SEQ ID NO: 1014 - protein, 117 aa, Artificial Sequence
  Synthetic
EVQLLESGGGLVQPGGSLRLSCAASGFTFSSYAMSWVRQAPGKGLEWVSAIIGSGGITYYADSVKGRFTISRDNSKNTLYLQMNSLRAEDTAVYYCAKGWFGGFNYWGQGTLVTVSS

SEQ ID NO: 1015 - protein, 109 aa, Artificial Sequence; identical to SEQ ID NO: 999
  Synthetic

SEQ ID NO: 1016 - protein, 10 aa, Artificial Sequence
  Synthetic
GFTFSSYAMS

SEQ ID NO: 1017 - protein, 10 aa, Artificial Sequence
  Synthetic
AIIGSGGITY

SEQ ID NO: 1018 - protein, 8 aa, Artificial Sequence
  Synthetic
GWFGGFNY

SEQ ID NO: 1019 - protein, 12 aa, Artificial Sequence
  Synthetic
RASQSVTSSYLA

SEQ ID NO: 1020 - protein, 7 aa, Artificial Sequence
  Synthetic
VGSRRAT

SEQ ID NO: 1021 - protein, 9 aa, Artificial Sequence
  Synthetic
QQGIMLPPT

SEQ ID NO: 1022 - protein, 117 aa, Artificial Sequence
  Synthetic
EVQLLESGGGLVQPGGSLRLSCAASGFTFSSYAMSWVRQAPGKGLEWVSAILASGAITYYADSVKGRFTISRDNSKNTLYLQMNSLRAEDTAVYYCAKGWFGGFNYWGQGTLVTVSS

SEQ ID NO: 1023 - protein, 109 aa, Artificial Sequence; identical to SEQ ID NO: 999
  Synthetic

SEQ ID NO: 1024 - protein, 10 aa, Artificial Sequence
  Synthetic
GFTFSSYAMS

SEQ ID NO: 1025 - protein, 10 aa, Artificial Sequence
  Synthetic
AILASGAITY

SEQ ID NO: 1026 - protein, 8 aa, Artificial Sequence
  Synthetic
GWFGGFNY

SEQ ID NO: 1027 - protein, 12 aa, Artificial Sequence
  Synthetic
RASQSVTSSYLA

SEQ ID NO: 1028 - protein, 7 aa, Artificial Sequence
  Synthetic
VGSRRAT

SEQ ID NO: 1029 - protein, 9 aa, Artificial Sequence
  Synthetic
QQGIMLPPT

SEQ ID NO: 1030 - protein, 117 aa, Artificial Sequence
  Synthetic
EVQLLESGGGLVQPGGSLRLSCAASGFTFSSYAMSWVRQAPGKGLEWVSAIIGSGASTYYADSVKGRFTISRDNSKNTLYLQMNSLRAEDTAVYYCAKGWFGGFNYWGQGTLVTVSS

SEQ ID NO: 1031 - protein, 109 aa, Artificial Sequence; identical to SEQ ID NO: 999
  Synthetic

SEQ ID NO: 1032 - protein, 10 aa, Artificial Sequence
  Synthetic
GFTFSSYAMS

SEQ ID NO: 1033 - protein, 10 aa, Artificial Sequence
  Synthetic
AIIGSGASTY

SEQ ID NO: 1034 - protein, 8 aa, Artificial Sequence
  Synthetic
GWFGGFNY

SEQ ID NO: 1035 - protein, 12 aa, Artificial Sequence
  Synthetic
RASQSVTSSYLA

SEQ ID NO: 1036 - protein, 7 aa, Artificial Sequence
  Synthetic
VGSRRAT

SEQ ID NO: 1037 - protein, 9 aa, Artificial Sequence
  Synthetic
QQGIMLPPT

SEQ ID NO: 1038 - protein, 407 aa, Artificial Sequence
  Synthetic
QVQLQESGGGLVQPGGSLRLSCAASGSTFSINAVAWYRQAPGKRRELVAGISGGGVTNYPDSVKGRFTISRDNAKNTVYLQMSSLKPEDTAVYYCNLWPPRASPGGRVYWGQGTQVTVSSGGSGGSGGSGGSGGSGGSGGSGGSGGSGGSGGSGGSGGSGGSGGSGGSGGSGGSGGSGGSDKTHTCPPCPAPEAAGGPSVFLFPPKPKDTLMISRTPEVTCVVVDVSHEDPEVKFNWYVDGVEVHNAKTKPREEQYNSTYRVVSVLTVLHQDWLNGKEYKCQVSNKALPAPIEKTISKAKGQPREPQVCTLPPSRDELTKNQVSLSCAVKGFYPSDIAVEWESNGQPENNYKTTPPVLDSDGSFFLVSKLTVDKSRWQQGNVFSCSVMHEALHNHYTQKSLSLSPGK

SEQ ID NO: 1039 - protein, 406 aa, Artificial Sequence
  Synthetic
QVQLQESGGGLVQPGGSLRLSCAASGSTFSGNAMAWYRQAPGKRRELVAGISGGGVTNYPDSVKGRFTISRDNAKNTVYLQMSSLKPEDTAVYYCNLWPPRVSPGGGVYWGQGTQVTVSSGGSGGSGGSGGSGGSGGSGGSGGSGGSGGSGGSGGSGGSGSGGSGGSGGSGGSGGSGGSDKTHTCPPCPAPEAAGGPSVFLFPPKPKDTLMISRTPEVTCVVVDVSHEDPEVKFNWYVDGVEVHNAKTKPREEQYNSTYRVVSVLTVLHQDWLNGKEYKCQVSNKALPAPIEKTISKAKGQPREPQVCTLPPSRDELTKNQVSLSCAVKGFYPSDIAVEWESNGQPENNYKTTPPVLDSDGSFFLVSKLTVDKSRWQQGNVFSCSVMHEALHNHYTQKSLSLSPGK

SEQ ID NO: 1040 - protein, 407 aa, Artificial Sequence
  Synthetic
QVQLQESGGGLVQPGESLRLSCAVSGSTSSMNAMAWYRQAPGKRRELVAGISGGGATNYPDSVKGRFTISRDNAKNTVYLQMSSLKPEDTAVYYCNLWPPRASPGGGVYWGQGTQVTVSSGGSGGSGGSGGSGGSGGSGGSGGSGGSGGSGGSGGSGGSGGSGGSGGSGGSGGSGGSGGSDKTHTCPPCPAPEAAGGPSVFLFPPKPKDTLMISRTPEVTCVVVDVSHEDPEVKFNWYVDGVEVHNAKTKPREEQYNSTYRVVSVLTVLHQDWLNGKEYKCQVSNKALPAPIEKTISKAKGQPREPQVCTLPPSRDELTKNQVSLSCAVKGFYPSDIAVEWESNGQPENNYKTTPPVLDSDGSFFLVSKLTVDKSRWQQGNVFSCSVMHEALHNHYTQKSLSLSPGK

SEQ ID NO: 1041 - protein, 452 aa, Artificial Sequence
  Synthetic
DKTHTCPPCPAPEAAGGPSVFLFPPKPKDTLMISRTPEVTCVVVDVSHEDPEVKFNWYVDGVEVHNAKTKPREEQYNSTYRVVSVLTVLHQDWLNGKEYKCQVSNKALPAPIEKTISKAKGQPREPQVYTLPPCRDELTKNQVSLWCLVKGFYPSDIAVEWESNGQPENNYKTTPPVLDSDGSFFLYSKLTVDKSRWQQGNVFSCSVMHEALHNHYTQKSLSLSPGKGGSGGSGGSGGSGGSGGSGGSGGSGGSGGSGGSGGSGGSGGSGGSGGSGGSGGSGGSGGSCDLPQTHSLGSRRTLMLLAQMRKISLFSCLKDRHDFGFPQEEFGNQFQKAETIPVLHEMIQQIFNLFSTKDSSAAWDETLLDKFYTELYQQLNDLEACVIQGVGVEETPLMKEDSILAVRKYFQRITLYLKEKKYSPCAWEVVRAEIMASFSLSTNLQESLRSKE

SEQ ID NO: 1042 - protein, 46 aa, Artificial Sequence
  Synthetic
KKYFRRITLYLTEKKYSPCAWEVVRAEIMRSLSLSTNLQERLRRKE

SEQ ID NO: 1043 - protein, 166 aa, Artificial Sequence
  Synthetic
MKYTSYILAFQLCIVLGSLGCYCQDPYVKEAENLKKYFNAGHSDVADNGTLFLGILKNWKEESDRKIMQSQIVSFYFKLFKNFKDDQSIQKSVETIKEDMNVKFFNSNKKKRDDFEKLTNYSVTDLNVQRKAIHELIQVMAELSPAAKTGKRKRSQMLFRGRRASQ

SEQ ID NO: 1044 - protein, 114 aa, Artificial Sequence
  Synthetic
NWVNVISDLKKIEDLIQSMHIDATLYTESDVHPSCKVTAMKCFLLELQVISLESGDASIHDTVENLIILANNSLSSNGNVTESGCKECEELEEKNIKEFLQSFVHIVQMFINTS

SEQ ID NO: 1045 - protein, 120 aa, Artificial Sequence; identical to SEQ ID NO: 6
  Synthetic Sequence

SEQ ID NO: 1046 - protein, 120 aa, Artificial Sequence
  Synthetic Sequence
DVQLVESGGGLVQPGGSLRLSCAASGSTFSINAVAWYRQAPGKRRELVAGISGGGVTNYPDSVKGRFTISRDNSKNTVYLQMSSLRPEDTAVYYCNLWPPRASPGGRVYWGQGTLVTVSS

SEQ ID NO: 1047 - protein, 120 aa, Artificial Sequence
  Synthetic Sequence
DVQLVESGGGLVQPGGSLRLSCAASGSTFSINAVAWYRQAPGKRRELVAGISGGGVTNYADSVKGRFTISRDNSKNTVYLQMSSLRPEDTAVYYCNLWPPRASPGGRVYWGQGTLVTVSS

SEQ ID NO: 1048 - protein, 120 aa, Artificial Sequence
  Synthetic Sequence
DVQLVESGGGLVQPGGSLRLSCAASGSTFSINAVAWYRQAPGKRRELVAGISGGGVTNYPDSVKGRFTISRDNSKNTVYLQMNSLRPEDTAVYYCNLWPPRASPGGRVYWGQGTLVTVSS

SEQ ID NO: 1049 - protein, 120 aa, Artificial Sequence
  Synthetic Sequence
DVQLVESGGGLVQPGGSLRLSCAASGSTFSINAVAWYRQAPGKRRELVAGISGGGVTNYADSVKGRFTISRDNSKNTVYLQMNSLRPEDTAVYYCNLWPPRASPGGRVYWGQGTLVTVSS

SEQ ID NO: 1050 - protein, 120 aa, Artificial Sequence
  Synthetic Sequence
QVQLQESGGGLVQPGGSLRLSCAASGSTFSIAAVAWYRQAPGKRRELVAGISGGGVTNYPDSVKGRFTISRDNAKNTVYLQMSSLKPEDTAVYYCNLWPPRASPGGRVYWGQGTQVTVSS

SEQ ID NO: 1051 - protein, 120 aa, Artificial Sequence
  Synthetic Sequence
QVQLQESGGGLVQPGGSLRLSCAASGSTFSIDAVAWYRQAPGKRRELVAGISGGGVTNYPDSVKGRFTISRDNAKNTVYLQMSSLKPEDTAVYYCNLWPPRASPGGRVYWGQGTQVTVSS

SEQ ID NO: 1052 - protein, 120 aa, Artificial Sequence
  Synthetic Sequence
QVQLQESGGGLVQPGGSLRLSCAASGSTFSIEAVAWYRQAPGKRRELVAGISGGGVTNYPDSVKGRFTISRDNAKNTVYLQMSSLKPEDTAVYYCNLWPPRASPGGRVYWGQGTQVTVSS

SEQ ID NO: 1053 - protein, 120 aa, Artificial Sequence
  Synthetic Sequence
QVQLQESGGGLVQPGGSLRLSCAASGSTFSIFAVAWYRQAPGKRRELVAGISGGGVTNYPDSVKGRFTISRDNAKNTVYLQMSSLKPEDTAVYYCNLWPPRASPGGRVYWGQGTQVTVSS

SEQ ID NO: 1054 - protein, 120 aa, Artificial Sequence
  Synthetic Sequence
QVQLQESGGGLVQPGGSLRLSCAASGSTFSIGAVAWYRQAPGKRRELVAGISGGGVTNYPDSVKGRFTISRDNAKNTVYLQMSSLKPEDTAVYYCNLWPPRASPGGRVYWGQGTQVTVSS

SEQ ID NO: 1055 - protein, 120 aa, Artificial Sequence
  Synthetic Sequence
QVQLQESGGGLVQPGGSLRLSCAASGSTFSIHAVAWYRQAPGKRRELVAGISGGGVTNYPDSVKGRFTISRDNAKNTVYLQMSSLKPEDTAVYYCNLWPPRASPGGRVYWGQGTQVTVSS

SEQ ID NO: 1056 - protein, 120 aa, Artificial Sequence
  Synthetic Sequence
QVQLQESGGGLVQPGGSLRLSCAASGSTFSIIAVAWYRQAPGKRRELVAGISGGGVTNYPDSVKGRFTISRDNAKNTVYLQMSSLKPEDTAVYYCNLWPPRASPGGRVYWGQGTQVTVSS

SEQ ID NO: 1057 - protein, 120 aa, Artificial Sequence
  Synthetic Sequence
QVQLQESGGGLVQPGGSLRLSCAASGSTFSIKAVAWYRQAPGKRRELVAGISGGGVTNYPDSVKGRFTISRDNAKNTVYLQMSSLKPEDTAVYYCNLWPPRASPGGRVYWGQGTQVTVSS

SEQ ID NO: 1058 - protein, 120 aa, Artificial Sequence
  Synthetic Sequence
QVQLQESGGGLVQPGGSLRLSCAASGSTFSILAVAWYRQAPGKRRELVAGISGGGVTNYPDSVKGRFTISRDNAKNTVYLQMSSLKPEDTAVYYCNLWPPRASPGGRVYWGQGTQVTVSS

SEQ ID NO: 1059 - protein, 120 aa, Artificial Sequence
  Synthetic Sequence
QVQLQESGGGLVQPGGSLRLSCAASGSTFSIPAVAWYRQAPGKRRELVAGISGGGVTNYPDSVKGRFTISRDNAKNTVYLQMSSLKPEDTAVYYCNLWPPRASPGGRVYWGQGTQVTVSS

SEQ ID NO: 1060 - protein, 120 aa, Artificial Sequence
  Synthetic Sequence
QVQLQESGGGLVQPGGSLRLSCAASGSTFSIQAVAWYRQAPGKRRELVAGISGGGVTNYPDSVKGRFTISRDNAKNTVYLQMSSLKPEDTAVYYCNLWPPRASPGGRVYWGQGTQVTVSS

SEQ ID NO: 1061 - protein, 120 aa, Artificial Sequence
  Synthetic Sequence
QVQLQESGGGLVQPGGSLRLSCAASGSTFSIRAVAWYRQAPGKRRELVAGISGGGVTNYPDSVKGRFTISRDNAKNTVYLQMSSLKPEDTAVYYCNLWPPRASPGGRVYWGQGTQVTVSS

SEQ ID NO: 1062 - protein, 120 aa, Artificial Sequence
  Synthetic Sequence
QVQLQESGGGLVQPGGSLRLSCAASGSTFSISAVAWYRQAPGKRRELVAGISGGGVTNYPDSVKGRFTISRDNAKNTVYLQMSSLKPEDTAVYYCNLWPPRASPGGRVYWGQGTQVTVSS

SEQ ID NO: 1063 - protein, 120 aa, Artificial Sequence
  Synthetic Sequence
QVQLQESGGGLVQPGGSLRLSCAASGSTFSITAVAWYRQAPGKRRELVAGISGGGVTNYPDSVKGRFTISRDNAKNTVYLQMSSLKPEDTAVYYCNLWPPRASPGGRVYWGQGTQVTVSS

SEQ ID NO: 1064 - protein, 120 aa, Artificial Sequence
  Synthetic Sequence
QVQLQESGGGLVQPGGSLRLSCAASGSTFSIVAVAWYRQAPGKRRELVAGISGGGVTNYPDSVKGRFTISRDNAKNTVYLQMSSLKPEDTAVYYCNLWPPRASPGGRVYWGQGTQVTVSS

SEQ ID NO: 1065 - protein, 120 aa, Artificial Sequence
  Synthetic Sequence
QVQLQESGGGLVQPGGSLRLSCAASGSTFSIWAVAWYRQAPGKRRELVAGISGGGVTNYPDSVKGRFTISRDNAKNTVYLQMSSLKPEDTAVYYCNLWPPRASPGGRVYWGQGTQVTVSS

SEQ ID NO: 1066 - protein, 120 aa, Artificial Sequence
  Synthetic Sequence
QVQLQESGGGLVQPGGSLRLSCAASGSTFSIYAVAWYRQAPGKRRELVAGISGGGVTNYPDSVKGRFTISRDNAKNTVYLQMSSLKPEDTAVYYCNLWPPRASPGGRVYWGQGTQVTVSS

SEQ ID NO: 1067 - protein, 120 aa, Artificial Sequence; identical to SEQ ID NO: 55
  Synthetic Sequence

SEQ ID NO: 1068 - protein, 120 aa, Artificial Sequence
  Synthetic Sequence
QVQLQESGGGLVQPGESLRLSCAVSGSTSSANAMAWYRQAPGKRRELVAGISGGGATNYPDSVKGRFTISRDNAKNTVYLQMSSLKPEDTAVYYCNLWPPRASPGGGVYWGQGTQVTVSS

SEQ ID NO: 1069 - protein, 120 aa, Artificial Sequence
  Synthetic Sequence
QVQLQESGGGLVQPGESLRLSCAVSGSTSSDNAMAWYRQAPGKRRELVAGISGGGATNYPDSVKGRFTISRDNAKNTVYLQMSSLKPEDTAVYYCNLWPPRASPGGGVYWGQGTQVTVSS

SEQ ID NO: 1070 - protein, 120 aa, Artificial Sequence
  Synthetic Sequence
QVQLQESGGGLVQPGESLRLSCAVSGSTSSENAMAWYRQAPGKRRELVAGISGGGATNYPDSVKGRFTISRDNAKNTVYLQMSSLKPEDTAVYYCNLWPPRASPGGGVYWGQGTQVTVSS

SEQ ID NO: 1071 - protein, 120 aa, Artificial Sequence
  Synthetic Sequence
QVQLQESGGGLVQPGESLRLSCAVSGSTSSFNAMAWYRQAPGKRRELVAGISGGGATNYPDSVKGRFTISRDNAKNTVYLQMSSLKPEDTAVYYCNLWPPRASPGGGVYWGQGTQVTVSS

SEQ ID NO: 1072 - protein, 120 aa, Artificial Sequence
  Synthetic Sequence
QVQLQESGGGLVQPGESLRLSCAVSGSTSSGNAMAWYRQAPGKRRELVAGISGGGATNYPDSVKGRFTISRDNAKNTVYLQMSSLKPEDTAVYYCNLWPPRASPGGGVYWGQGTQVTVSS

SEQ ID NO: 1073 - protein, 120 aa, Artificial Sequence
  Synthetic Sequence
QVQLQESGGGLVQPGESLRLSCAVSGSTSSHNAMAWYRQAPGKRRELVAGISGGGATNYPDSVKGRFTISRDNAKNTVYLQMSSLKPEDTAVYYCNLWPPRASPGGGVYWGQGTQVTVSS

SEQ ID NO: 1074 - protein, 120 aa, Artificial Sequence
  Synthetic Sequence
QVQLQESGGGLVQPGESLRLSCAVSGSTSSINAMAWYRQAPGKRRELVAGISGGGATNYPDSVKGRFTISRDNAKNTVYLQMSSLKPEDTAVYYCNLWPPRASPGGGVYWGQGTQVTVSS

SEQ ID NO: 1075 - protein, 120 aa, Artificial Sequence
  Synthetic Sequence
QVQLQESGGGLVQPGESLRLSCAVSGSTSSKNAMAWYRQAPGKRRELVAGISGGGATNYPDSVKGRFTISRDNAKNTVYLQMSSLKPEDTAVYYCNLWPPRASPGGGVYWGQGTQVTVSS

SEQ ID NO: 1076 - protein, 120 aa, Artificial Sequence
  Synthetic Sequence
QVQLQESGGGLVQPGESLRLSCAVSGSTSSLNAMAWYRQAPGKRRELVAGISGGGATNYPDSVKGRFTISRDNAKNTVYLQMSSLKPEDTAVYYCNLWPPRASPGGGVYWGQGTQVTVSS

SEQ ID NO: 1077 - protein, 120 aa, Artificial Sequence
  Synthetic Sequence
QVQLQESGGGLVQPGESLRLSCAVSGSTSSNNAMAWYRQAPGKRRELVAGISGGGATNYPDSVKGRFTISRDNAKNTVYLQMSSLKPEDTAVYYCNLWPPRASPGGGVYWGQGTQVTVSS

SEQ ID NO: 1078 - protein, 120 aa, Artificial Sequence
  Synthetic Sequence
QVQLQESGGGLVQPGESLRLSCAVSGSTSSPNAMAWYRQAPGKRRELVAGISGGGATNYPDSVKGRFTISRDNAKNTVYLQMSSLKPEDTAVYYCNLWPPRASPGGGVYWGQGTQVTVSS

SEQ ID NO: 1079 - protein, 120 aa, Artificial Sequence
  Synthetic Sequence
QVQLQESGGGLVQPGESLRLSCAVSGSTSSQNAMAWYRQAPGKRRELVAGISGGGATNYPDSVKGRFTISRDNAKNTVYLQMSSLKPEDTAVYYCNLWPPRASPGGGVYWGQGTQVTVSS

SEQ ID NO: 1080 - protein, 120 aa, Artificial Sequence
  Synthetic Sequence
QVQLQESGGGLVQPGESLRLSCAVSGSTSSRNAMAWYRQAPGKRRELVAGISGGGATNYPDSVKGRFTISRDNAKNTVYLQMSSLKPEDTAVYYCNLWPPRASPGGGVYWGQGTQVTVSS

SEQ ID NO: 1081 - protein, 120 aa, Artificial Sequence
  Synthetic Sequence
QVQLQESGGGLVQPGESLRLSCAVSGSTSSSNAMAWYRQAPGKRRELVAGISGGGATNYPDSVKGRFTISRDNAKNTVYLQMSSLKPEDTAVYYCNLWPPRASPGGGVYWGQGTQVTVSS

SEQ ID NO: 1082 - protein, 120 aa, Artificial Sequence
  Synthetic Sequence
QVQLQESGGGLVQPGESLRLSCAVSGSTSSTNAMAWYRQAPGKRRELVAGISGGGATNYPDSVKGRFTISRDNAKNTVYLQMSSLKPEDTAVYYCNLWPPRASPGGGVYWGQGTQVTVSS

SEQ ID NO: 1083 - protein, 120 aa, Artificial Sequence
  Synthetic Sequence
QVQLQESGGGLVQPGESLRLSCAVSGSTSSVNAMAWYRQAPGKRRELVAGISGGGATNYPDSVKGRFTISRDNAKNTVYLQMSSLKPEDTAVYYCNLWPPRASPGGGVYWGQGTQVTVSS

SEQ ID NO: 1084 - protein, 120 aa, Artificial Sequence
  Synthetic Sequence
QVQLQESGGGLVQPGESLRLSCAVSGSTSSWNAMAWYRQAPGKRRELVAGISGGGATNYPDSVKGRFTISRDNAKNTVYLQMSSLKPEDTAVYYCNLWPPRASPGGGVYWGQGTQVTVSS

SEQ ID NO: 1085 - protein, 120 aa, Artificial Sequence
  Synthetic Sequence
QVQLQESGGGLVQPGESLRLSCAVSGSTSSYNAMAWYRQAPGKRRELVAGISGGGATNYPDSVKGRFTISRDNAKNTVYLQMSSLKPEDTAVYYCNLWPPRASPGGGVYWGQGTQVTVSS

SEQ ID NO: 1086 - protein, 120 aa, Artificial Sequence
  Synthetic Sequence
DVQLVESGGGLVQPGGSLRLSCAASGSTFSIWAVAWYRQAPGKRRELVAGISGGGVTNYPDSVKGRFTISRDNSKNTVYLQMSSLRPEDTAVYYCNLWPPRASPGGRVYWGQGTLVTVSS

SEQ ID NO: 1087 - protein, 120 aa, Artificial Sequence
  Synthetic Sequence
DVQLVESGGGLVQPGGSLRLSCAASGSTFSIWAVAWYRQAPGKRRELVAGISGGGVTNYPDSVKGRFTISRDNSKNTVYLQMNSLRPEDTAVYYCNLWPPRASPGGRVYWGQGTLVTVSS

SEQ ID NO: 1088 - protein, 120 aa, Artificial Sequence; identical to SEQ ID NO: 55
  Synthetic Sequence

SEQ ID NO: 1089 - protein, 120 aa, Artificial Sequence
  Synthetic Sequence
DVQLVESGGGLVQPGGSLRLSCAASGSTSSAWAMAWYRQAPGKRRELVAGISGGGATNYPDSVKGRFTISRDNSKNTVYLQMSSLRPEDTAVYYCNLWPPRASPGGGVYWGQGTLVTVSS

SEQ ID NO: 1090 - protein, 120 aa, Artificial Sequence
  Synthetic Sequence
DVQLVESGGGLVQPGGSLRLSCAASGSTSSDWAMAWYRQAPGKRRELVAGISGGGATNYPDSVKGRFTISRDNSKNTVYLQMSSLRPEDTAVYYCNLWPPRASPGGGVYWGQGTLVTVSS

SEQ ID NO: 1091 - protein, 120 aa, Artificial Sequence
  Synthetic Sequence
DVQLVESGGGLVQPGGSLRLSCAASGSTSSAWAMAWYRQAPGKRRELVAGISGGGATNYPDSVKGRFTISRDNSKNTVYLQMNSLRPEDTAVYYCNLWPPRASPGGGVYWGQGTLVTVSS

SEQ ID NO: 1092 - protein, 120 aa, Artificial Sequence
  Synthetic Sequence
DVQLVESGGGLVQPGGSLRLSCAASGSTSSDWAMAWYRQAPGKRRELVAGISGGGATNYPDSVKGRFTISRDNSKNTVYLQMNSLRPEDTAVYYCNLWPPRASPGGGVYWGQGTLVTVSS

SEQ ID NO: 1093 - protein, 10 aa, Artificial Sequence
  Synthetic Sequence
GSTFSIAAVA

SEQ ID NO: 1094 - protein, 10 aa, Artificial Sequence
  Synthetic Sequence
GSTFSIDAVA

SEQ ID NO: 1095 - protein, 10 aa, Artificial Sequence
  Synthetic Sequence
GSTFSIEAVA

SEQ ID NO: 1096 - protein, 10 aa, Artificial Sequence
  Synthetic Sequence
GSTFSIFAVA

SEQ ID NO: 1097 - protein, 10 aa, Artificial Sequence
  Synthetic Sequence
GSTFSIGAVA

SEQ ID NO: 1098 - protein, 10 aa, Artificial Sequence
  Synthetic Sequence
GSTFSIHAVA

SEQ ID NO: 1099 - protein, 10 aa, Artificial Sequence
  Synthetic Sequence
GSTFSIIAVA

SEQ ID NO: 1100 - protein, 10 aa, Artificial Sequence
  Synthetic Sequence
GSTFSIKAVA

SEQ ID NO: 1101 - protein, 10 aa, Artificial Sequence
  Synthetic Sequence
GSTFSILAVA

SEQ ID NO: 1102 - protein, 10 aa, Artificial Sequence
  Synthetic Sequence
GSTFSIPAVA

SEQ ID NO: 1103 - protein, 10 aa, Artificial Sequence
  Synthetic Sequence
GSTFSIQAVA

SEQ ID NO: 1104 - protein, 10 aa, Artificial Sequence
  Synthetic Sequence
GSTFSIRAVA

SEQ ID NO: 1105 - protein, 10 aa, Artificial Sequence
  Synthetic Sequence
GSTFSISAVA

SEQ ID NO: 1106 - protein, 10 aa, Artificial Sequence
  Synthetic Sequence
GSTFSITAVA

SEQ ID NO: 1107 - protein, 10 aa, Artificial Sequence
  Synthetic Sequence
GSTFSIVAVA

SEQ ID NO: 1108 - protein, 10 aa, Artificial Sequence
  Synthetic Sequence
GSTFSIWAVA

SEQ ID NO: 1109 - protein, 10 aa, Artificial Sequence
  Synthetic Sequence
GSTFSIYAVA

SEQ ID NO: 1110 - protein, 10 aa, Artificial Sequence
  Synthetic Sequence
GSTSSANAMA

SEQ ID NO: 1111 - protein, 10 aa, Artificial Sequence
  Synthetic Sequence
GSTSSDNAMA

SEQ ID NO: 1112 - protein, 10 aa, Artificial Sequence
  Synthetic Sequence
GSTSSENAMA

SEQ ID NO: 1113 - protein, 10 aa, Artificial Sequence
  Synthetic Sequence
GSTSSFNAMA

SEQ ID NO: 1114 - protein, 10 aa, Artificial Sequence
  Synthetic Sequence
GSTSSGNAMA

SEQ ID NO: 1115 - protein, 10 aa, Artificial Sequence
  Synthetic Sequence
GSTSSHNAMA

SEQ ID NO: 1116 - protein, 10 aa, Artificial Sequence
  Synthetic Sequence
GSTSSINAMA

SEQ ID NO: 1117 - protein, 10 aa, Artificial Sequence
  Synthetic Sequence
GSTSSKNAMA

SEQ ID NO: 1118 - protein, 10 aa, Artificial Sequence
  Synthetic Sequence
GSTSSLNAMA

SEQ ID NO: 1119 - protein, 10 aa, Artificial Sequence
  Synthetic Sequence
GSTSSNNAMA

SEQ ID NO: 1120 - protein, 10 aa, Artificial Sequence
  Synthetic Sequence
GSTSSPNAMA

SEQ ID NO: 1121 - protein, 10 aa, Artificial Sequence
  Synthetic Sequence
GSTSSQNAMA

SEQ ID NO: 1122 - protein, 10 aa, Artificial Sequence
  Synthetic Sequence
GSTSSRNAMA

SEQ ID NO: 1123 - protein, 10 aa, Artificial Sequence
  Synthetic Sequence
GSTSSSNAMA

SEQ ID NO: 1124 - protein, 10 aa, Artificial Sequence
  Synthetic Sequence
GSTSSTNAMA

SEQ ID NO: 1125 - protein, 10 aa, Artificial Sequence
  Synthetic Sequence
GSTSSVNAMA

SEQ ID NO: 1126 - protein, 10 aa, Artificial Sequence
  Synthetic Sequence
GSTSSWNAMA

SEQ ID NO: 1127 - protein, 10 aa, Artificial Sequence
  Synthetic Sequence
GSTSSYNAMA

SEQ ID NO: 1128 - protein, 10 aa, Artificial Sequence
  Synthetic Sequence
GSTSSAWAMA

SEQ ID NO: 1129 - protein, 10 aa, Artificial Sequence
  Synthetic Sequence
GSTSSDWAMA

What is claimed is:

1. A fibroblast activation protein (FAP) binding agent comprising a targeting moiety, wherein the targeting moiety comprises three complementarity determining regions (CDR1, CDR2, and CDR3), wherein
(a) CDR1 comprises an amino acid sequence of:
(i) any one of SEQ ID NOS: 1108, 1129, 1093 to 1107, and 1109-1128
(ii) any one of SEQ ID NOS: 87 to 115;
(iii) any one of SEQ ID NOS: 851 to 861;
(iv) an amino acid sequence having one to five amino acid substitutions, deletions, or insertions in any one of the amino acid sequences of (i) to (iii);
(b) CDR2 comprises an amino acid sequence of:
(i) any one of SEQ ID NOS: 126, 128, 116 to 125, 127, and 129 to 144;
(ii) any one of SEQ ID NOS: 862 to 876;
(iii) an amino acid sequence having one to five amino acid substitutions, deletions, or insertions in any one of the amino acid sequences of (i) to (ii); and
(c) CDR3 comprises an amino acid sequence of:
(i) any one of SEQ ID NOS: 157, 159, 145 to 156, 158, 160 to 175;
(ii) any one of SEQ ID NOS: 877 to 879;
(iii) an amino acid sequence having one to five amino acid substitutions, deletions, or insertions in any one of the amino acid sequences of (i) to (ii).

2. The FAP binding agent of claim 1, wherein the FAP binding agent is a full-length antibody, a single-domain antibody, a recombinant heavy-chain-only antibody (VHH), a single-chain antibody (scFv), a shark heavy-chain-only antibody (VNAR), a Fv, a Fab, a Fab′, or a F(ab′)₂

3.-4. (canceled)

5. The FAP binding agent of claim 1, wherein the FAP binding agent comprises an amino acid sequence having at least 90% sequence similarity with:
(a) any one of SEQ ID NO: 1087, 1092, 1086, 1088-1091;
(b) any one of SEQ ID NO: 2 to 42;
(c) any one of SEQ ID NO: 46 to 86;
(d) any one of SEQ ID NO: 837-850; or
(e) any one of SEQ ID NO: 1045-1085.

6. The FAP binding agent of claim 1, wherein the FAP binding agent comprises one or more signaling agents.

7. The FAP binding agent of claim 6, wherein the signaling agent is selected from one or more of a wild type interferon, a wild type interleukin, a wildtype tumor necrosis factor, or a modified form thereof.

8. The FAP binding agent of claim 7, wherein the targeting moiety and the signaling agent are connected with one or more linkers.

9. The FAP binding agent of claim 7, wherein the signaling agent is a modified interferon alpha 2 (IFNα2) comprising an amino acid sequence having at least 95% identity with SEQ ID NO: 176 or 177 and wherein the modified human IFNα2 has one or more mutations that confer improved safety as compared to a wild type IFNα2 having an amino acid sequence of SEQ ID NO: 176 or 177.

10. The FAP binding agent of claim 9, wherein the IFNα2 has:
(a) one or more mutations at positions 144 to 154 with respect to SEQ ID NO: 176 or 177 with respect to SEQ ID NO: 176 or 177; or
(b) one or more mutations at positions L15, A19, R22, R23, L26, F27, L30, K31, D32, R33, H34, D35, Q40, H57, E58, Q61, F64, N65, T69, L80, Y85, Y89, T106, D114, L117, R120, R125, K133, K134, R144, A145, M148, R149, S152, L153, and N156 with respect to SEQ ID NO: 176 or 177.

11. The FAP binding agent of claim 9, wherein the modified IFNa2 has one or more mutations at position R149, M148, or L153 with respect to SEQ ID NO: 176 or 177.

12.-13. (canceled)

14. The FAP binding agent of claim 6, wherein the signaling agent is a modified interferon-β (IFN-β) comprising an amino acid sequence having at least 95% identity with SEQ ID NO: 178 and wherein the modified human IFN-β has one or more mutations that confer improved safety as compared to a wild type IFN-β having an amino acid sequence of SEQ ID NO: 178.

15. The FAP binding agent of claim 14, wherein the modified human IFN-β comprises one or more mutations at positions W22, R27, L32, R35, V148, L151, R152, and Y155 with respect to SEQ ID NO: 178.

16. (canceled)

17. The FAP binding agent of claim 6, wherein the signaling agent is a modified tumor necrosis factor α (TNFα) comprising an amino acid sequence having at least 95% identity with SEQ ID NO: 182 and wherein the modified TNFα has one or more mutations that confer reduced receptor binding affinity as compared to a wild type TNFα having an amino acid sequence of SEQ ID NO: 182.

18. The FAP binding agent of claim 17, wherein the modified TNFα has one or more mutations at positionsa position selected from 29, 31, 32, 84, 85, 86, 87, 88, 89, 97 115 145, 146 and 147 with respect to SEQ ID NO: 182.

19.-22. (canceled)

23. The FAP binding agent of claim 1, wherein the FAP binding agent comprises one or more additional targeting moieties.

24. The FAP binding agent of claim 23, wherein the one or more additional targeting moieties recognize or functionally modulate a tumor antigen or an antigen on an immune cell.

25.-27. (canceled)

28. The FAP binding agent of claim 24, wherein the one or more additional targeting moieties recognize or functionally modulate PD-1, PD-L1, PD-L2, CTLA4, OX40L, OX40, CD20, XCR1, Flt3, or Clec9A.

29.-30. (canceled)

31. A recombinant nucleic acid encoding the FAP binding agent of any claim 1.

32. A host cell comprising the nucleic acid of claim 31.

33. A method for treating or preventing cancer and/or a fibrotic disease, comprising administering to a patient in need thereof an effective amount of the FAP binding agent of claim 1.

34.-36. (canceled)

37. A method for treating or preventing an autoimmune and/or neurodegenerative disease, comprising administering to a patient in need thereof an effective amount of the FAP binding agent of claim 1.

38.-190. (canceled)
